United States Patent Application Publication US 2023/0172999 A1 - sequence listing, part 8

SEQ ID NO: 10 - DNA, 2623059 bp, Alistipes putredinis (residues 1-1,311,530 of 2,623,059)
  misc_feature (1289073)..(1289215): n is a, c, g, or t
  misc_feature (1544327)..(1544336): n is a, c, g, or t
  misc_feature (1551771)..(1551780): n is a, c, g, or t
  misc_feature (1837258)..(1837408): n is a, c, g, or t
  misc_feature (2028572)..(2028714): n is a, c, g, or t
  misc_feature (2064582)..(2064731): n is a, c, g, or t
  misc_feature (2078817)..(2078971): n is a, c, g, or t
  misc_feature (2119266)..(2119275): n is a, c, g, or t
  misc_feature (2148883)..(2149026): n is a, c, g, or t
  misc_feature (2220511)..(2220652): n is a, c, g, or t
  misc_feature (2393497)..(2393671): n is a, c, g, or t
catgcaagtacggtttgggggcaggtacgggaaaacctactgccgaaaggcagtaaggcgttctgtaccgagcctacgaaacgtcgcaaccgatcagacctatcagcttaaaatatcgggtccgggtatccgaacgagaagcaaggagatcgagatcaaatacgttcccggcagaataggcaacatcgattactacattcctgtcgagcgctctgccgataccgtagctttccgacccgtggaaacgtatcgtcccaaacagattgcccccgatgcccggacgatcgaggatctttacagccatattccgggcataacctacgaagatggttatttgaccgatgaaaacggcgccacggtatgtcttatgttcagcggtattattccggatgaggctggatatgcagctattttgacaaatctgaccgcagacaacatcgagcgtatcgaatattacagactggacaacctggaagagccgtattacgacggggtattgaatttcgtaactgtcggagtgaatttcaatgccccctccattaaggaacaactgacgccttcccccggttgcgaactataatccgctcccttcccgccccgtcttcactactctattttatattcttttcaaactccgcaactatgagacacccccgacttatccccgttcttcttctgatcatcataacgagcctggcgacaccgctccaggcgcaaatcgtcctgaaaggtaaaattaccaccgagaaaaacgaaccggtcgccttcgccccggtcattctccagcaactgccggatacgacccgctacacggaaggcgtgataaccgatatggccggcaattaccggttcggaaaacaccgtgcgggccgctacctgctatcggttcggacaatcgggtacaagactctttacgatacggtgcttcttcgcaaaccttcgataggcatgacggaggtcgtccgggattacgtcctgtccgaagatgtcgcagagatcgatgcggtggtcgtcacggccaacaacacagccagctatttcgaccggacggtatataccatcaccaatgaagaccggaaggcggcggtcacgagtctcgatctgaccaacaagattccgcagatcagaatcaaccgccagaccaatcaaatcaccgcgtccgatggcagtgtgacggtcttggtaaacggtatcgcctcttcggaacaggaattgacgactctgcggcccgaagatgtccgaaagatcgaatactacgatctgccgcccatcaaattcggcctcagcaacggcaataaagtcatcaacattatcacgaaaattcgggaagacggaatatacggaagtgtggagctgaaccaacatctgacttcgccctggttgaacgatagttttttcctgcaatacaaccggggacggcatcagttggcatttactgcaaacataggctacggatcatgggatgatcaatatgcctcggatgaaatggaatatacgctcgacggggtggatttccggcaggaggaagaacggcagagtgaaaacaacttcttaagtcctcaatttagtctcaaatacacgaatcaactccccggaaaatatgtatttcaagcccgctttttcccaagttatgataagcattctcaacagaccgattcccggcttgcctttattcaggatggcataggttcggaccgttacggagtgaaggaaagcgagtcccactcattcaatccgacgctcgacctgtacttctggaggcaattccgcaaccggcatgaactaatgataacacttcgaggcgattacataaattctgtttccgatacctataagaaccaatacgcattatcggacgatacgcctgtatttgaagattttcttaatatggacggagacggctatcagatgaacggccaagctctctataccaagactttcgacaagctgacgctttcattcggagattatttttactatgatattagcaaatatcgaatagacaacacgtcgggctattcccgggaaactaacagcattctgaaaaattattttgccggagagatcaccggaaagatcgggcctcggtttacttatcgtttttctttgggagtaacagggacacgaacaaaaacaaacgacaacgatatttggcaatgggtctttgcgcctcgggtagatatcggttatcgtatttcaccctcttttatgctgaaagccggattcgtccaagccaatatgcagccaggactgggacaactcagcgaagccacttcgttttataatcaaaatattatcgtacacgggaatcccgagctggtcggcggccgtgcgaaccagacgactttcaatgtcgtatatcataacaaatggctcaatataaatgtttcatacagctacttatattacaagaatccaatcgactactattatcagtatgaacagccgtatatcgcatactcaccgattaatgacaactgggcagatgtgcactccgtacattatgatttgagactcagcccattcaaaaacgacttgctggcattgaaattaggcggaggattcagttatacaaaagtcgattcgaaagtattggggagggtgactcattttcaggctccgatgtactatgagctgactttcaactacaaaaacttttccgcatattatcagggtgcgataccttgtaaaggattgtctattccgatgatatacgacagtgaattatcctctgcgataggtgtgagatataaatacaaagactgggcatttcaactctcctgcgacaatttcctcaccaatccggaaagccattaccattccatcgagaacagtatcgtcagaacacaagggacttcttatgtaaaaaatgcctggaacagagtaatgttgaaaatcaacttccgtttcggaaaaggtaaacagtaccaggaacctgtacggaaaaccgtcgaggagggactatagaaattttgtggctacaatattggcctaatttgttattgcccaggcatccgtctcatacagcccgacaaattatcgcgacaaaaacagaactctccgactaccagaatcaccatctttgaacatattctagatagaatgcacctcagaaaaccgggaacaagttcccggtttctcctggctttcaatatatttgcaagagcgaaaccgaatcgaacaccttatgtttactgccagaaaagcctccgtcgaagattgtggactgatacgcgaaatggcctgcgtcgcatttcccgacacctataaaaccatcctttcgcccgaacagttggactacatgatggagtggatgtactcccccgaaaacctccggcggcagatggccgaagggcacgtatattacatcgcctacaaggacggcactccctgcggctatctctctgtccagcccgaagcagacgacctctacatcctgcaaaaaatctacatcctgccccgattccagggtgtgcacgcggggagcttcctcttccgcaaggctatcgaacacatcaaacagctccacccggctccctgccggatggagctccacgtaaatcgccataacaaagccgtaaaattctacgaacggatgggtatgcgcaaattgcgcgaaggcgatttcgaaatcggaggcggattctacatgaacgactatatcatggggctggaaatctgatcggattccggcccgaatacgaaacgacgatgccgatgatttttcgatcatcggcatcgcttttccattacgggaaacgccgcctccctacgaattcaccttggcgtggtctgccaggaactgcgccaaaccgatgtcggtcagcgggtgtttcagcaaacccttgatcgccgcaagcgggcaggtcgccacgtcggcccccgcctcgacacactggacgatgtgctgcgtatgccgaatcgaagccgccagcacctgcgtatcataaccgtagtaacgatacatacgcacgatctcggcgacgagagccaccccgttctcgcaaatatcgtccagacggcctacgaacggcgacacatacgtcgcaccggccttggctgccagcagagcctgaccgacggaaaagaccagcgtgcagttggtgcggatattcttgcccgcgaaatacttcacggcacgaataccgtcggccgtacacgggagtttgaccacgatattcttgtgcaaggccgccaacgcttccccttcgcggaccataccgtcgaaatcggtggcgatcacctcggcgctcacatcgccatcgacgatggagcagatttcgaggtaatggcgacggcaggcctcctcaccgcgaatgttctccttggccatcagcgaaggattggtcgtcaccccgtcgagcacacccatttcgttagcttcccggatctgggccaggttagctgtatcgataaaaaatttcatagtgggaaatatttaagtaacatgaaaaagcaaaccaatgaaccggaatgaagaagtaaaaccatcgttccgagccgaatttacgccgcataaaagtacgaaaaaaaacgaaacccgaacactccttgccggaaaattccgcaaagacccgcaggaaacgcctccgccccgtatcatacggccggtaacagaaaacagaaaacagaaatcggcagcccgatcgcagctatcgaatttatttcgtcgttatcgataatccggcgagataattactacctttgcggccgaaaaatcgaaacatcatgaatttcatcacccttctcgactatgtcggtaccttcgcattcgccatcagcggcatccggctcgcttcggccaaacatttcgactggttcggagcctatgtggtcggattcgtcacggccgtcggcggcggtacgctgcgcgacctgctgctgggcctgccccctttctggatgcagaacgtttcctacctggtcgtatcgggattcgccttcctgttcgtagtcgggctgcgcaaatacgtgatccggctcaacaacaccttcttcattttcgatgccgtcggactgggacttttcaccgtcgtcggcattcagaaaagcatagccgtcggctatccgatgtgggtgggtatcatcatgggtacgctgaccggtgcggcgggcggtatgctgcgcgacgtgctgctgaacgaagtaccccttattttccgcaaagacatctacgccatcgcctgcatctgcggcggactgatctactatctctgtatgtatctcgacctgccggcggcccccacgcagttcatcgccgcctgctcggtgatcctcattcggattctggcggtacggtacggcatctcccttccggcactcaagggcgaaaccagaccggcacccaaagagaaataacgaatcgtttccgaaataccggtccggcggtcgcttcgacaacacgacaattccgccgacctgcagaaagggatcgaatagcaaaaaagaattacggatcttattccgccgccacagacgacggacggctgatttcggccgtttcgcccccgacgaagcgaagcagatcctgcggagcgatccggatctgcaatccccgaactcccgcactgatataaatgacggagtgttgcaaaacggaaatatggaaaaaggtcgggaacggttttttcatcccgatcggggaacagccgccccggatgtatccggtcgtcggaagcaactcccggacgggaatcagatcggctttcttgttgcccgaaatgcgggcggcagctttcagatcgacctcgtgatctccagggacgacacagacgaaatggcccgtccggtcaccacgaagcacgagcgtcttgaaaaccgcagcaacatcttcgccgagctgttcggccacgtgagtcgcggccagatgctcctcatccacccgatacgggatcaattcgtaggcgattttggctcggtcgagcagacgggccgcattggtcttttctattttgacgttcccatgtttcattccgcagaaagtagttccatccggatcggcaaaaataataatttttgacagtccggtaaaatctttgtatttttgggtatatttatattttaggaaaatccgaaacgacattccggaaaggcttcgatgaaacgactctgcggcatactcctcgctcttgcgggactatttctgtacgccccctgcgccgcccagaacacccgggtgcgcggtacggtcacggacgcacagacgggcgagccgattccctacgccgtcgtcctgttcccgggtacgaccaccggcatcaccaccgacgacgaagggttctactcgctcgaaagccgcgacacgtcgagctacatccgggcggaaatggtcagttatgaacctcagatacgtccggtccacgtcgggggctacaaccaaatcgacttccggctcactccttcgcatctggaaatcgaaagcgtcgtaattacccctggggacaatccggcccatccgatccttgaaggcattatccgcaacaaaaaatacaacgactccaaggagtacgaccgctacatctgccgcacctatacgaaaatggaactcggactggccaatatccgggaattccggagcaaaaaactccaacagaatttcggtttcatcttcgagcacctagacacctcgtccgtcacgggacagccctacctgcccgtgatgatctccgaaacagcggcggattactaccacagccgcacgccgtccgtcgcccgcgaggtaattcgcgccagccagatatccggtatcgaagacaacagcgtgctggcgcaattcaccggacacctgcacgccgacgtgaatctttacgaaaacttcatcgacctgttcggcgtgaagttcgccagccccctctccaactcgggacgctcattctacaaatactttctggtggacagtacgaacgtggaagggcgcaagacctacaaaatccggtttcaccccaaaagtgtcgccaccccggtactcgacggcgaggtcaatatcgactcggcaagctatgcgctgcgttcggcccgcgtaaaaatggccaaaggagtcaatgtaaactggattcgccacctggcgatcgaagccgacaaccgattgacggccgactcgctgtggttcccgcagcgggagaagatgaccgccgattttacgctgaccaaatccgactcctcgaagatgatcgctttcctgggcagccacgaggtaacctattccgacgtaaagttcgacacgccgatccccaaacaggttctgggtacgtcagccagcgtgatcctctcggacgatgccatttcgggcaagcaggtcgaatgggactcgctgcgtccctacaccctcacccaaaaggaaaaggccatctatcaaatggtcgattcgatccagcaggtccccctctataaaaacatatacaccgtcctcaatactatcatcggaggctactacaacaccaaatacgtcggcataggtccctactccaaagtaatcagcttcaaccgactggagggcgcccgtttccagataggcgcacgcacgaccaaagagttcagccgccgcgtacggctctcgacctacctggcctacggcacccgcgacgaggacttcaagggagctgcggaggtagagttgatgctgcgccgacaactgctgcgcaaactgacggtcacctaccgcaacgacgcgatacagctcagctcgggtgtcagcgccctctcggaaaacaacatcctaagctcgatcttctcccgaggcggcacctcgcggctttcgactatcgaggaagggatcgccctctacgaacacgagtggctgcacgggatcagcagttcgttcgagctgcggggccgtcacatctcctcgaaccgctacgtaccgatgatcctgccggacgggcgttcgctgcatggcatcaacgacgcttcgatacggatcgggctgcggctgtccaaagacgaaacgatcgtccgcatgccgttcgaggtacgacacatgggttcgaaatacccgattttctccttcgacttcacgggggcaaaaagaggagtcttacccgccagctacgactacctgcggctcgaaggccgcatgcagtaccggctcaacctgccgcctgtgggatactcgcggctcatgctcgaaggcggcaagatcttcggcaaggttccctacctgctgttgaagctgcacgagggaaacggcacctatttttacgaccgctatgccttctcgtgcatgaatttctacgaattctcgtcggacgcctggatttcgttcttctacgaacaccacttcaacggattcctgctgggccgcgtaccgctcctcaaaaaactcaactggcgcgaagtctttgttttcaagggagtttacggcaccctttcagcccgcaacgacggcagtcttccgaatacgaaagcggtcatgctctttccggtgggaatgtcgtcggtcgaacacccttacctcgaaaccggtttcggcatcgagaacatcttccgtctgctgcgcgtggatttcatttggcggctcacacaccaccgccccatccccggactgtcgatcccgaccttcacggtcaatttcagtcttaacctcaaattttaggtgcatatatacttttttagcgtgccacttcgggtacgtagcctccaaacttccctccgagaagagaatacatataggagagcggaattacggatgcggccacaggtcggcgaataagcaacctccggatcggatgctgcgatcgtcggaaacggcgcattaaaaaaagatataatcgccatttcaagcatacaatcccgcctcaaagagttccgccccgcaatttcccggtcgtttcggcggcaactcccggaaatatgattacttttgcgcggaaaaaacaacaagatgatacggggagttctattcgatatggacggcgtactggtaaacaatacccaggcacacgtcaaggcattcgagatattctgcgagcgttacggcgtcgaagattggcagcacaagctccagaccgctttcggcatgggtaacgacgacatcatgcgcctgatcctgcccgaagaaatcatccgcgaaaagggaatgaaagcgctcggcgaggagaaagaagccatctaccgcgaagtctatgctccggaaatccgccccgtacgggggctcgtggaactgctcgaagagctgcgccgtcgcggaatccgctgcgccgtcggttcttcaggctgccgcgagaacgtcgatttcgtcctcagcaactgcggtatcaccgactacttctcctgcatcgtcagcggcgaccgggtgacccgctgcaagcccgacccggaaatatacctgctggcagccgaaggactgcacctgccttcggccgaatgccttgtattcgaggatgcccgggtcggcatcactgctgcccgccgggccggagcaggccgcatcgtggccctggcaacgactctaccccgtcatacgctcgcaacccaaacggaagccgatgtcgtcatcgacgatttcgcctcgataaccgatctcaatgctctgctattatgagccgtgccctcgctaccatcgccctgctgatcctttccaatacctttatgacattggcttggtacgggcatatcgctttcaaatccaaaatagagcgcttcgggatgctgtccatcatcctgctcagctgggggatcgccctgttcgaatactgtttccaagtcccggccaaccgcatcggcagctcccaactgggaggccccttctcgatctgggagctcaaagtgatccaagaagtcatctccctgctggtcttcacggtcttcgccgtcgtcttcatgaaatcggacaccctgcggtggaaccacctggcgggtttcgtctgcctgattctggccgtctatttcatcttccgcaaatagtcgtttaacaaaaccatgtttttcaatgaattacaaaattcattgaaatttatttccgatttcgtttgcgaataatcccggaaaagcaatacctttgcacccgcaaggttcggacttggaatcacttttccaagccgattaatagagaatgccgtgaaaatcggcgacagtacctgctgctgtgagtttcagcccccgaccgggcaacttcgcgcactctttgccactggctatatcgctgggaaggcgttgcggaggaaacgagtcagaagacctgccttgacaatcaggatttacacccgcgggtttcgggtcgaaatcgtgcaagatagtcttcggcgcgctatttttccatgtatttcttctgtaccctcgcgtgtaagttccggacaggactaaacgacaggagtatcgatgacttacggctattttacggctgacatttcaacgggcgtgacatgcgctcactctacccggccttcgccgggctgcgcttcaggcgttctccggaacggacattcgtttcctccggcggacgccttcgtcgtttcggcgcagcacaatgcccctcctccgaaccgacgggttccgatacagcctgcctattctgcggaacatggaaaacaaaattcaaccaataaatcaaattcttaaattatgaaaaaattctttacgctgttagttctcgctgcctgctgcgcagcaatgacctggggctgttcggacgacaagtacgacgacaccgaaatccgccaggagatcgaaaacctaaaacaggagatcgcttcgatgaaggaacaggtcaattcgctcaagacgatcatcgacgccctgaacgaaaacaaattcatcaccaactacaccgaagcggcggacggaagctgcacgatcactttcaacgacggcaagaccatcacgttgcacaacggcaaagacggcgcagcggcgccggccatcggcatcgcgcaattcgaaggcatctactactggacgctgggcggcgatgaccagtggttgctcgacgataaccagaacaagattccggttgcgggccaaaacggtaaaaccccgaccatcaacaaggacggctattgggagatcgacggcgaaaccatcaaaggcgaagacggacagccgatcaaagcggtcggtaaggacggtgcgaacggcgataagggagaagacggcgactctttcttcaaaagcgtcgtacaggacgatgaaagcgtaaccttcacgctcaccaacggcgatcagatcgttctgcccaaagccaaggaggtgaatttcgtcatcgagcgcacatcgctgacgctgaaattcggcgcttcgcagaacctcgccgttacccaaaaaggcgttgaaaacctcgccatcgccaaacccgacggctggcgcgcctggctcgaaggcgatgtgctgaccatcacagcccctgccaaggagaacgtatatgccgaaacctcgggtgaagtatccgtcgtagccgtaggcgctaccgcaacggtcatagccaaggttcaggtactcgccaccgatgaaatcctcggcggcgcaggcgccggatcgagcgaatgggaagagtggaactaacggataaaaaggagattaccgatgaaaaactacttatacatattgtgcgcattcctgctcgcattcgcaggatgcacgaaagatgcggacgtagaacctatcgcccctgctcctgacggaaatacgcaggtcgtactgaccggattctccggccggggcacccgcaccggtttcggcggagccgaagacggagccgttccgttcctctggagcgccggcgactacatctgggcacgcaatacccgaagcgaagccatcgccgaaggcggcagccaggcgacattcgttttcgaatccctcgaaacggccgacacgtacgacgtattctacaacctgaccggcccggcagccgcaacagccctgattccggccgagcagacacagcaggcagccggagagttgaacctgggccaaaacggtgacttcggttatgcaacggcgcaaaacggaacctttacgctcgagcatgcgacctcctacgtctggttcgacacctattcgagcgatgtcacctcgaacctgctctcgatcaccttgagcgtatcgggcggtcagaccatcgccggcgaagccgctttcgccgacggaaagctgggcgactgcaaaggctcttcgtccgtcaccctgtcgttcggcgaagagggtgtcgccctgccttcgcagagcaacgataccgacgtgttcgccgccatggtgctctaccccgccgatctttcgacggcaacggtttcgatcgtctataaattcgccgacggttcggtttatctgcaaaccaaatcaggcaaaacgcttaccccaggccacacgctgcgcctctcgacacagatcgccaagtccgactgcaaaaactccggcgcattcttcatgaccgaagccggtgttgcggaagagctgccgaccgagccgatcggctacctgaaagtcgttaccctgggcgaatcgaccctctcggccgaagaactcacctcgattgcagggaacctcgcaaacggtgcggtcatcgacctgggtgaagctaccttcgccacgaccgaatttccgatggacttcacccgcaagaccaatcttcaggagatcgcactgccccgtaatatccagactttcactcccagcacctacaattccggggctttctacggctgtgagaacctgacgcgggtaacctttccagaaggcctgactgccatcgggcagaactgcttccgcaactgtgccaaactggaatccatcgagcttccttcctcggtgcgcacattggacatctatgcgttctacggctgcaaattgctgacatcggtcgtaattcccgaaggtgtggaagcaattccacgattcttattcgacagttgcacagctctgaccgatgtaaccctgccctcgacactgaagagcatcggagccgaagcattcgaagcgaccggactcgaagagatcacgatcccggaaagcgtgactacaatagaatcatccgtattcaagaactgcaaatcactggaacgcataagtttcccgatgcactgactgcaattccggccaacctgtgcaacgcatgttcggccctcacgacaatcaatatgccctccaagctggagactgtcggcaacgacgccttctacaactgcggcaagttgcaggacgtaaccttccccgaaacgctgaaatcgctcgacgagcgctcgttcggcggttgcagcgccttcacccgcattattatcgatatccccgcgatcgccaactacgccttctggaactgcgccaacgtcacctcgatcgacttgggcgagaaggtcacctcgatcggacgcaatacgttcatcatggctaacaatctgcaaacgatcacctgccgggccaagaatgcgccctcgctgggaagcaccgccttcggcagcgccggcagcaaggtggagggaaagaaaatcctctatgttccggcagcgtcctacgatgcctatgaaacggcctggacggacgtaacctcacaaggatatgcgctgcaggacatcaacgaccagcaactgacggacggcatctactatcgtgcttcgcgcgaggccgactgggttccgaccctgcctgcgacgttcaccgcactgtatgtacgcaccgtaggcgacgatgcagcccttaccgccagccagttcaataccctcgtcaccaaaatctcggcacagtccgctcccgtgacgctcgacttgagcatggcgaaattcgaagcaacggaattccccgtctcactggccggcaatgcgaaactgggtacgatcaaattcttcgaaaatacgacctcgatcgcagccggagccttcaaaggctgtacggccctgaccaaggcgaccgttccgaccggtgtcgaaatcatcggcgaaagcacgttcgaaggatgtacagcgctggcatccctcaccctgccgtcgagcgttaaaaccgtcggcgacaaagcgttcaaagggtgtagcgcactcgtcgaaacaagcctatctgcgatcgaaaacatcggaaccgaggcattcgccggtaccggtcttacctcggcaaaaatttctgccacgacactcggcgaaaagagcttccgcgactgtaccgaactcacggccattaccctcggttcggcaacgaccatcccggccgaaatgttcgcaggctgtacttcgatcacgaccgtcaccatccccaagtcgatcgaaacgatcggtacgagcgctttcgacggctgctccaaactggcgaccctgacattgggcaccggtgtgacgaccctcggcgatcgtgctttcgccgactgcggcctgacggcactcgccctgcccgacaacgttaccacgctgggtgacggagccttcagcaacaaccccaatatcgctacgctccaattcggtgcaggcctcaccgccatcagcgacaatgctttcgcaacaaacaacgcgatcgagagcctaaccatcccgaaaacaatcgccacgatcggcgccggttctttcgcgaactggtcgaaactgaccaaattgaccatctcgggcaacacgctgacctcgatcggcagcaaggccttcgaaaacgccgcactgctcgcagacgtctatgcggaaccgacaacggcccctgcggtacaggccgacagtttctccggcgcgggtacttcggtccaaggctccaaaacgttccacgttgcgtcggtcgaagcctactcctcctggaccacagccgccagcggctatacgatggaggcgctcggtcccgactacctgagcgaaggcctttactaccgcgcttccggcgaagatccctggaaatcggaaattccgcaaaccttcactacgctgtacgtcaagacggccggtgacaatacggtgatgacgaccgctcaaatgaaatccgtagccgatgcagttctggctctcgcagcccctgccacggtggatttctccgaagtcgtctatgaatcgacaactttcccgaattcgttcaagtcgaatgcgaacctcgcaggcatcgtattcccgcagaacgtcacggcgaccgcttcggcggccttccaaaaaacgggcatgacttcggtaacggtactgaaagacatcagctacggatcgaacgctttcgactcctgcgcatcgctcgtcagcgtgactgtcgaggagggtgtgaccgaaatcggcaactacatgttccagaacaccaaactgacctccgtaaccctgcccaattccgtcacgaagatcggagcaagcgcattcaacggctgctcgctgacaacgatcaacttcggtcagggtgtaaaaacgatcgagaattccgcattccaaaattgcggagagctgaccgagatcatcctcccggatgccacggaaacactcgggcagaatgccttcggagattgtccaaaactggctaagatttcgttaggcaagaatatgaaaacactcgaagcatactgtttcgtcggctactcgaaaggctgccccttgctgggtgacatcatctgtcgggcaactaccccgccgaccctgaaggacgactacggtaccggtcccttcggcggcggttggagtcccgttgcaggcaaagacgtccctgctgagaaccggatcatccaccttccgaaatcggccgatctggtcggcggtacgggagcctacgccgactcttcgtgggttaaattgacctcctcaacttatggattcgccttcaaatacgatgtggaaggctaacactaaaatagaatgatcgcgcggtgaaaatgtcggcaatcctccccggattgcaggcattttcatccgcatttaatcgaatcgccatgaaaaaattactatacatcctcgcaggactcggcctggcggcctgcacctcggacatcgaggaacttcccgaagtcggtccccaacccggacgggaggtagccctcacgggtatttccggcaccgcgagccgcactcaattcgtgcctggcgacgggaccgaaattcaatttcaatggagcaccggcgaccgaatctgggcaggcggcgtacagagcgccgaagcgggaacggacggcaatgtcgccgacttcggattcacgaacctcccgggggatgcaccctaccggatttattacaacatgaccggcaccgacgccgaagccgtcgttccgaccgaacaacgccaggcggagccgggcaaactgcaactcggaccgaacggcgatttcggctatgccacgaccgactccgaaggacgattcaccctctcgcacgccaccgcttacgtctggttcaacccctggtcgcaggacgtgaaggagaagctcgtttccgtcacgctggcagcgaccgacgcctcgaccgtactgaccggtacgcgcaccttcgacggcaccggattcagcgatgcgaccgatgcgaacaacgccgtaacgctttcgttcggcaaggagggtgtcgaactgcccgcgacgagcagcaccgcgagcgtattcgccgcagcggtcgtctatccggcggattgcagcgcagaggaaatacacgtaacctacaccttcgccgacggcagcgtctataccgagaccaaaaccggacgcaatttcgaagcgggccgtatctaccgcctgacgaccgagattaccaagcgcgacggaggcagcctcgaaattcaggggctggaggattcggacgaacccgtttgtatgaaatacggcgcttcggaagcgtatgcactgacggccggaggatggattcccacggtcgaaatgacatcggcaccggcaggctggacggccgatttcgatatcgcacggcgttcgctcctgatcgctcctcctgcggaatacaccgacggaatggatttggaaaacaccgtaacgatccagtccgacgacaaaccgatcctctcgcaggagtactacgtgctcgacttcacccatcccgaaggcacgttcgtcctcatagagggcaacatgacctcggagaacggcacgatcgtctatttcgaccaacacatgcgctatcatgaaaaggtttacgaggagatcaacgacaacgaaatcggcaacgtccttcaggatatgtacctggccaacggcaagatctacttcattacccaaaacggcaagacaagcagcatgggaactacattcaacggcgacggacgcttcgtcgtctgcgatgcccacacgatgaaacgcctcgtggcacgcgacatgccgttctacgcaaacatcgatacctctacgggtgccacccaaagttcaaaatcgaccctctgctggccgcagcacatcgtggtcgtaagtcccgaaaaagcctacatccaatattccacggccgacaacgaatcccattcgggcatccgtatcgtggaccttcagaccaatatcatccgtacgagcgacatcccgggtacattcggcgtcttcacgaaaacgggggcgaccaaggcccgcatgatcttctcgcgcggcaaggtcttcgccggacgcggcaattcggtgatcgtcctcgatcccgcgacggatgccgtaatcaaaaccgtcacctacgaaaaccgccaggtgaaagacctcgcaaagggttacgatgggaaaatttatgctatctttacgggcgaatttaccggaaactcgggcatgaccggtgcggcgagcttcaccaaaccggctatgatcgtagcgttggacgcgaacggcgaggtcgtttcggaaacgaacctgcccgaacagatcgaactgcgcacgggcacggcttcgccgacagtgcagatgtgtgcgagcttcacgcagccgcacctctatttcatcggcaaacaggacttcagcgcctatgaagcgatgcgttacaactacgaaaccggcaaggtcaattgggactacatcacggcagacctcgatgcggatcattcgggcggcgacatcatctacggctacatgggcgtacacccgacgaccgaacagttatgggtcggcaaatcgacctatacgcagagcgccgtccatgtctatgacgtatcgcggagcgatgccctggagttttcgagcttctaccagaagaaagcgagtccggcaggcgtggatttcgcctaccgtttctcggacgaatggataaacagatagacttatgttcaatgggttgaaaagaggaatcgtaatctgtgcatgcgcggcgctggccgtgtcgtgcatggattacggaccgatagagaaagaggatttcgaaatcgacaacataggttcgggcgacgaagtgaccggcaaggggctcttcatcaccaacgaagggaatttcatgtacggcaatgcctcgctctcctattacgatccggagaaaaaacatgtcgagaatgaagttttcgccagagccaacgccatcaagctgggcgacgtcgcgcagtcgatggtcatccgcaacggtatcggttggatcgtagtgaacaactcgggcgtgatctatgcgatcgacatcaacaccttcaaggaggtgggacgcatcacgggcttcacttcgccccgctacatccatttcctgagcgacgaaaaagcctacgtcacccaaatctgggatccgcgcatctacatcgtcaatcccaagacctaccagatcaccggctatgtcgaaacggatatggatttcgaaaccggttcgactgaacagatggtgcaatacgacaaatacgtcttcaccaactgctggtcgtaccagaaccgaatcctggtgatcgacaccgaaaccgacaaggtctgcgaccagatcaccgtgggcatccagcccacctcgctggtcatggacaagtacaacaagatctggacggtgaccgacggcggctacgaaggttcgccctacggacacgaggcgccatcgctctactgcatcgacgccgcaacccgcaagatcgagaaacagttcaagttcaaattcggcgactggccctccgaagtgcagctcaacggcacacgcgacacgctctacttcatcaacaaggcggtctggcgcctgccggtaacggccgacaagtttccggtaaaaccattccttccctacaacaatacgctctactacggactgacgatcaaccctgtcaattcggaagtctatatcgccgacgcgatcgattacgtgcagaacggtgtcgtactgcgctattcgcccgacggcgaactgctcgacgaattctatgtcgggatcatccccggcgccttctgctggcgctaatcatataataagaatcatcatccatgaacaaaatacggatctatttcatattgctcgctctgacggcggtcgcctgcaacaaggacgagctcatcaccaccgatgtcgaacaggtgccgatcatcacgttcgacaccgacccggccgtctatcccgtcaaggtcggccgggagttcaccattacgccctcctaccagttcgtcgatcgggccgtttactcatggaaactggaagaaacgggcaaaatcatctcgaccgaaccgcagctcacctaccggttcgattccggcaatgaaatttcggaaggcgtcaacggctactacatcgacctggaggtaaccaccccgaacggcacgaccgtcgaaacggttctcgtcgaggtacaggagctgctgccgcccctgatctctttccccatgcagaccgacgggctggaggtcgtgaaaggacgcaaatacgaattcgcgcccaccgtacagtcggccgagaacagcacttttctctggacgctgcgccgtccgggtgccgccgaagccgaaccggtcggcgatgaggccgtctatgaattctgcgaggagatcgccggaacatacgaagtctccctgcgcacggaaaacgaggacggctcggacgaaatgacaatcgaggtggaggtggtcgatgcactggcggtatcggttacggcggtacctatcggacgcaaatacgacggtctgacccgcaccgtatcgctcgaccgcacgatcactctgcggccattcatctggaacggcaccaaccccaagttcagttggacgatcgacggacaagaggtcgggaccgagctttcgtacacctataccccgaccgaaacgggaatcaaaaagatcgttttcaccgtaacggataccaccgacgaacccgaaatgaccctctcgaagtgcatcacgcgcaccaatgaaacccgggctacgctggagttcaccgtcgaatgccacagcgaagaagagtcgcaccgccgcccggcttcgggagccagcagcgcgacgtgggaccgggtgtacgaatatacgccggccccgggacagttcatcaacgaactggtttcgggcggattcaccggtacggaaaccagtcccgaagcggcagtcgcctacgccgaagaacggatgaagaaaaatacctgggtatcgctcggcggctggggcggctacatcgtcgtgggcttcgaccacagcatcgacaactcctcgtccggatacaagggaggctacaacttctcgatcacgggcaacgccttcaagggttcgtccgaaccgggtatcgtctatgtgatgcaggacaccaacggcaacaccctgcccgacgacgaatggtatgaactcaaaggatcggaatacggcaaagaggagaccgttcaggattacgcggtcacctattaccggccgacctactcgggagccgacgtacaatggaaggacaaccagggcgtcaagggcaagatcgactacctgaaacagtaccacgaccagcccagctactacccggcgtggatcggcacggacagctatacgctttacggtccctgcctgaagagccgcacctacgaccagtcgggcaacggctcctactgggtcaatggcgaatacgactggggctacgccgacaatttcggcaacgaccgtctttcggaggacgacaatgccgcagcaggcgccatgaaggtctatttcaaaatctcgaacgcggtcgataagaacggacagcccgccaacctcaaatacatcgacttcatccgggtacagaccggcgtcaatgccaaagccggctggctgggcgagaactccacggaggtattcggatttacggacgaaaacatcaaccagggcaaataggcgggaatatgaaaataacaggtataatctgctgcctcgcactactgtgcacggcatgcagcgaagagaagaccgaactgccctggggcagcgacaactacatagtatcgttttcgctgactaccggcgccgacacctacccggccgtcatccgcgacggccggattacggtaagcatcccctacaacgtatcgttggaagacgcgcaggtatcctacgaattatgcgagcacgcctcgatctaccccgacccggcgactgtcgccgactgggaccaggagtggcagtttctggtcagctcctacgacaatcaaaacgaccgcacctacctctatacggtagagcgcaccgacattgcgaccgatggcagtctgacacttcggacgcaggccgaagtggacgctttcgcccggagcggaatcaacaccgtcgaaggcaacctcaccatcggaggcgaggacgaagaaaaccccgtcacgaatctggacgggttgaaaaacctcgtttcggtccgctgcgacctgacgatcaccgccgcctatacgggtgaaacattggccggactggaaaacctgaccgcctgcgaatcgctgcggatcggcagcgcggcccatcccaacgaaacgctcaggcagctttcactcccggccctgaaagagatcaaaggcgacctgtgcgtctacggcacggctctgcaaacggcggatttcaaatccctgcaaagcgtcgccgggcacttcgtcctccagtcggacgccctgctccaactgacggccgacgagctgaccaccgttgccgggaatatgacgctgatcggaacgaccgcagacgaagccaaagccccgtgcgaacagatgtattttccgaaactgcaacgcatcgacgggacgcttaccctctcccgcttcgaccggttatcgggactgggcaccacgttcggtgttctgacccaggccggagcgcttcgctacgaacatctcgctctggccaatacgttcgaatttccgctgatcgaaaccaccgggaacatcaccgtcaccgactgccctattttgcgatcggtcctgctgccggcactcaccgacgccggatcgctcgaaattacggggtgtccggccatcgaaacattatccttcccgaaagcggagcgtttcgacggcgacgttagcctggcaacgctccccgcgatcaaggatttcggggaattccttccggcgctcaaagccatttcaggcgacctgtcgatcgacgacctgtcgtcgctcgaaggcgtactggatctctcgggatgcactttttctccgaacagtacgctcgacctgcgtctggtcgccgcgacgcgactgacggagctccggggcggcgatttcggcggctcgctgcggatcgacgcctcgtcgctgacgccgcaaccggaagcgatgcctttcggaatcaccgggttcaaaaacctcgataccctgcggatcgccggattcacgcatgtttccgaactctctttgccgacggaaagctgcgatgacctcacgatcgaaaattgcggatcgcaagccccgttcacgctctcgctgccgaatctcgtcgaagtgcggggaacgcttctctgccgcaactgcggcaaggcaggcgaagcgaattcggcttcgtttccccggctgaaaaacgtcggccggcagctctcgttctacgtaggtgcctcgtcgttcaccgtcctcgaatttccgctgctggaaaccgtcggcaacggagagcccgtttcggatgatccggcagacgactacgccctctacacgatgccttcgggttgcgcgggtgaattcatcctgccgagcctgcaacgggtaaacggcagcatgctggtatccacctggaacacatcgaccgaccgggccgtcgcgttccgcttcccctccctgcagagcgtcgcgggagaaatcagcgtcggacacacggcctacaaaaacaggtcggtcgcaacgctcgatttctccgccctgaccgctgccggggcgatccgcatcggcaacctctcgtcggtaacggatttctcgaccttcacgcaggtccttccccgactctccgaacagacctggagcgtgacagactgcagctataaccctacatatcaacaaatgctcgacggcgaaaccggagccgaatccaaatgatgaaacacctattgacaatcgtactgtgcctcacaacgctcaccgggcttgcacaggaggagaaaatcaaaaaaagcgagtggtggaacggcaatccttcgtatgccgttcccatccgcgaagtcaatgtcacggcacggcggccgatgaaggagatcggcatccagaaaacccagctcgacactacgatattgcatgaaaacatcgcactctcgatggcggacatcctgactttcaacacgtcgattttcgtcaaacagtacggccgcgccaccctttcgaccgtggcgttccgcggtacgtcgccctcgcatacgcaggtgacgtggaacggtatgcgaatcaactccccgatgctgggcatgacggacttctcgatgatcccctcctacttcatcgacgacgcctcgctgctgcacggcacctcttcggtcaatgaggcgggcggcggcctgggcggggcggtcaagctctccacgcgccctgccgatgcggacggtttcaacctgcaatacacgcagggtgtcggctcgttttcgactttcgacgagtttttgcgcctcacctacggcaacgaccgctggcaaacttcgacacgcgtcgtctattcctcctcgccaaacgacttcaagtacagaaactacgataaaaacgtgcttatcctggacgacgaccacaacatcatcggctcctactacccgatcgaacgcaacaaaagcggtgcataccacgatttccacgcgttgcaggaagtctattacaataccggacacggcgaccgtttcggattgcaggcctggtatgtcaattcgaagcggggacttccgatgctgtcggtcgatcacaaggagaacgacgactacctgaaccaacagcgcgaacaaaccctgcgcagcatcctttcgtgggatcacctgcgcaaaaagtggaaagtgggcgtcaaagccggttatatccatacctggatggcctacgactacgaacgggaactcggcaacggaaaaatggagaagatgatccgctcgcgcagcacgatcaacaccttcttcggccaggtggacggagaatactacctcggggagaagtggctcttcacggcaaccgtttcggcacaccagcatctggtacgaagcatcgacaaaaacattatcccgatggataaccagcagccgaccgatcccaacggcaacaaaaccaaagtgcccgtcggttatgacaaaggacgcatcgaactgtcgggatacgtgtcgatccgctaccgccccaccgagcgcctgggcctttcgataggcctgcgcgaagagatgttcggctcggagtggacaccgatcattccggccttcttcaccgactatctgatctcgaaacgcggcaacctcgtcgccaaggcctccatttcgcgcaactaccgcttcccgtcgctgaacgacctctacttcctgccgggcggcaaccccgacctgaaaaaggagcacggcttcacctacgacgccggtctgtcgttcgctacgggccgcgacggagtttacaccctgcggggcgaagccacttggttcgactcctacatcgacaactggatcgtctggctgcctacggccaaaggattctggacgcccaaaaacgtcaaggaggtgcatgcctacggcgtggaggtgaaagcggggctggacgtacagttggccaaagactggcagttgagcgccgacggcaacttctcgtggaccccctcgatcaaccacggcgacccggtggactggtacgacaaggcgatcggcaaacagctcgtttacatccccgaattttcggcttcggtaacggggcacctgacctaccgttcgtggcggttcacctacaaatggtgctattacagcgagcgtttcaccacctcggacaacgatatgaagaccaagatcggacgtgtgaagccttacttcatgagcgacatttcgctcgaaaaagccttctcgttccgctgggccgacctctcgcttaaaggagtcatcaacaacctcttcaacgaagagtatcagtcggtgctttcgcgcccgatgccccggctgaactacgagattttcctcgacatccgccctaaatggggaaaacggaataaaaaacagtaactttgcaccgcccctcgaaactccgaccgggctgaaaacgaaactctgacaatgaaaaaactactttatatcctgttgtcggcgatcctcgcggccgcaaccgcctgtcaccaccgatccgccgcctcgctcggggatttcgacatcagcctctacgcccccgcctactcctcgggcttcgaaattttcggagcggaagggatgaaaagcacgatactgaagacatacgccccgtggcagggagccgaaggcgaggaaacgcagctcttcatcgcccgcaacggcgaacaggctccggcggattttccgggacaggtactcgacggcgacgcccggcgcatcgtctgcatgtcctcgacctacatcgccatgctcgacgccctgggcgaaccgcagcgggtagtcggcgtatcgggcatcgactacatcagcaacccctacgtcgcctcgcacaaggaacagatcggcgacgtgggctacgacggcaacatgaactacgagcggctgctttcgctctccccggacatcgtgctgctgttcggcgtcagcggcgccagcgccatggaacccaagctccgcgaactgggtattccctacgcctatatgggcgagtacctcgaacagtcgccgctgggcaaggccgaatggctcgtggccgtagcggaaatcgccggaatgcgcgaacggggcgaagaggtgttccgcgaaatacccctccgttacgacagcctgaaaaccctcgcggcgaaagccgaacgaaaacccgtcgtcatgctgaacactccctacggcgactcctggctgatggctccgccttcgagctatgtcgcccggctgatcgccgacgcaggaggacaatacgtctatacccaggacacgggcaatcagtcgcgccccatcgacacggaggaggcataccggctggccgaaatgtccgactgctggatcaacgtcggctccgccgcatcgctcaaggaactagcggagatcgtccccaaattcatggatacgcgccccgtgcgggaagggagggtctataacaacaaccggcgcaccaacccctcgggcggcaacgactactgggaatcgggcgtcatacacccggacctgattctgcaagatctgatccgcatcttccacccggaattgacggatgccgaaccgacctattaccgaaaactgaactaaaccgatgcaacgacggcagcgcatcctctttctcctgttcggagttctggcggcggtacttttcgtcgtcgatctctcggtcggagccgtacccatcccgatccgcgaagtcctcgccgcactgacgggcagcggaaacgaccccgtcacaacgaagattatcctgaacatccgcctgctgaaagccgtagtcgctctgctggccggcgccgccctcgccgtgagcggcctgcaaatgcagaccctcttccgcaatccgctggccggaccatacgtgctgggcatcagctccggcgcgagcctcggcgtagcgatcttcctgctgggcgctccgcttctgggcctcacgggacacccgctaatctccaccctcggcattgcgggcgctgcctggatcggctcggcgctgatcctgatgctgatcgctgcggtcagccgccgaatcaaagacatcatggtcattctcatcctgggcatgatgttttcgtcgggtgtcggagccgtcgtgcagatcctgcaatacctgagcaacgaagccgccctcaaatctttcgtcgtctggacgatgggatcgctcggcgacgttacgctcggacagctcggtctgctgcttcctgccgtcgttctcggactcgtgctggccgtcgcggtcatcaaacctctgaacctgctcctgctgggcgaaaactacgcccgcacgatgggactcgacatccgccgttcgcggcagttgatcttcctctccaccaccctgctggccggtacggtcaccgctttctgcggcccgatcggattcatcggcctggccgtcccgcacgtcgcccgcattctcttcgccgatgccgaccatcggattctggtcccggcctcgatccttacgggcatcgtggtgatgctcctttgcgacgtgctggccaaactcctcaccttccccatcaacacgatcacggcgctattgggcatccccatcgtcatctgggtcgtcatccgtaacaaaagcatcgtatgatccgactgaacgaccttactatcggttacggccaccgcattctgctgcaacacgcctcggcgacgattcccgccggggaactggtcgccctcgtaggccgcaacggtacgggaaaatcgaccctgctgcgggctatcgccggcctcggcgaacggctggggggcgaaatccggctcgacggacactctctggaaacgctctcaccccagcaactggccaccaccgtcagcttcgtcaccacggaacgggtccgcattcccaacctacggtgcgaagatgtcgtagccctcggacgagccccctacaccaactggatcggacgcgtacaggaacaggacaaagccatcgtggaacgctcgctggaactagtcggcatggcagctttcgccggaaaaacgatggaccgcatgtccgacggcgaatgccagcgggtaatgatcgcccgggccctggcccaggacaccccgatcatcctgctcgacgaaccgacctcgttcctcgacctgccgaaccgttacgaactctgcacgctgctgcgacggctggcacacgaccaccgcaagtgcatcctcttctcgacgcacgaactggacatcgccctttcgctctgcgactcgatcgccctgatcgacccacccgtgctgcgctaccttccgaccccggatatggcgtgcagcggctacatcgaacggctgttcagcaattcgttcgtcaccttcgacacggagagcggcacgatcaaagtccgcaagtaacagactcattgtaaatatatcacgggcggaatacatcgattcgtctaaataatcttttatgtttacaacaaaaaggaaaaagactcttcgaagagacggacaaagaccctcttttcggtgacgaaagcggcgaaaacttgtcctacgaaagtctaccggcggatcatcccgtcacgaactacagagctcggcaagtcgcttcctgtctgcggaacaatagtccattatccacacccatcaaacgaatatcgcatcaaccgaagtgatcggcacggttcataaatcgaagctaatattcccaaatacaaaacagtcttaggtggagaaaaaatccgccataatagatataccacgatcgttttcttgcttatttcggcgatagtccggtaccctgcacattattcaacgtgccccatcccctcctcttcgaaaaaggattcgaagagaaaagtcaaggcataccgatcggagccgatcggtgcaccgggacatataatcaggaataaaatagtaaaatatcgattatcgtacagacccggaaatttgagaaaacgaccgttattttttatatttgtggctctggaatgcatttttaacacattcggttccaaatatataacattcggtcactttataacctttcggatatgacaatcgaaaaactggacggaacttcgcctcgcctctacacactcgtcgcaccgttggtcatgcggcgcagcgtactgcgccagaacaacaactacccgttctggacttcgcgctcgcatacctggttcgtggcctgggagggcgaaaccgttttcgggttcatacccgtagagatcaccgacggcggtgtggccaagatcaacaactactacgtttcgggcgacgatccgcatttgctgtcgcgctttttacgcgaaataatccaatattaccgccgcgactatacgatacgctccatgacgctgatccgccatgcggagatattccgctccgaagggttcgtcccgatgaaagagtggacgcagtacgtaacgatggagtacagcaaaaaccggtagccatgaatgtttatgagcggacacagcaacggttgaaaacggttttcgaccttttcgacaatatctacgtctccttttccggcggcaaggacagcggtgtgctgctcaacctctgcatcgactacatccggcaacacggattgcaacgccgaatcggagtgttccatatggattacgaaatccagtaccgcgatacgctcgactacgtgaaccggacgctggccgcgaacgccgatattctcgacgtctatcgggtctgcatcccgttcaaagtacagacctgtacttcgatgttccagcaatactggcggccgtgggacggctccatgcgggacatttgggtacgggaaatgccggaaggaagcctgacacagcacgattttccgttcttcaccgacgaaatgtgggactacgagtttcagaaccgtttcgccgagtggctccacagacgcagcggtgcgaagcgcacctgctgtctgatcggcatccgcacgcaggagagcttcaaccgctggcgcacgatttacagcgaccgcaaccactaccggttcgccggcaaacgatggatccgccaatgggtcggcagcggcatctgcaacgcctatccgctttacgactggctgacaaccgacgtatggacggcgaacggacggttcgggtggtcgtacaaccggctgtacgacctgttttaccgcgcaggcgtaccgctggacagccagcgtgtcgccagtcccttcatctcgccggccatcgcaagcctgcatctctacaaagccatcgatccgaacacatggggccgtatggtgggccgggtaaacggagccaatttcgcagcgctgtacggtcggacaaccgccgcaggctggcagtcggttcatttgccgcaaggaatgacctgggagagctacatgcatttcctgctctcgacccttccggaaccgatacgacgcaattatctggaaaaactctccgtaagcatccgcttctggcgcgacaagggcggatgcctctccgacgaaaccatcacgaagctgcaaaaggccggcattcggatcgaagtcggcgaccgcagcgcctatcgcacggacaagcggccggtacgtatggagtacctcgacgacataagcctgcccgaattcagccatctgcctaccttcaagcgcatctgtatctgtattttgaaaaacgaccacgcctgcaaatacatgggcttcgcgccgaacaagaacgaaacgcagcgccgcaagaaaatcatggaaaaatatgaatcgttactctgaatctcaaacgaagagcgcctaccggagcccggtctataacgtccgcgccgtgccggtagagaaggtcgtggcgaacagctacaatcccaacgtggttgcgccgcccgaaatgaagctgctcgaactgtcgatctgggaagacggctacacgatgccgtgcgtctgctactacgatgcggagcgggaccgctacgaactcgtggacggctatcaccgctacctggtcctcaaaacctcgaagcggatctacgaacgcgaacggggcctgctccccgtcgccgtgatcgaaaaggatctctcgaaccgcatggcctcgaccatccgccacaaccgggcacgcggcacgcacaacgtcgaactgatgagcgaaatcgtcgccgaactgacccgggcgaacatgtccgaccagtggatcatgcgtcatatcggtatggaccgcgacgaactgctgcggctcaaacaaatcacgggccttgccgacctcttcgccgacaaggagttcagtctgggcgataccgacgaagacagcgtcgaagagatgctcgaagtgtaaccgaacctactccggaaggacgaccatttccacgggctgttcctggatccggtccaacggatgggactggtaggagcttttaccgaagtcgatctgcgcaaggtctatgcagcggatcgtattgttataggccgttttgtaatagacccggcgattggtcagatcgatggccgaagtccactgcgtagcgctcgggatgtccggacactccccttcgggatgctcgatgccgatgggcacatcgaaattgttgagcaggtgaaaacattgctgcacggtttcgaatccggtagcacgctgcggagccgtcgcccgataaaaagccgctctcacgaagcgcgacggcggcgtggcgtcgcccggaagaccgagaaatccggaattgccgccgataggacgcagcgtgatgccgctcaaccgccgggcaggagcgtcaccgggataaaggttcacatagttgttcagattggtgagctgccactcgaaaccgggggcattggtgagtacgccgacttcgttctcgtagaaatgcggcaccccgccgacgatttccagcaccacctgccgtccggaaggctctccgatacgccaatgcacgaccgacgagggctccagtccgacgacccgaaccgaagcgatggccgctttcacctggtcgatggtcgagaactgcgtcagtatccaggccacgagttgcagatcggccagcgtgcggtcgctctgcgccggatcgtactgttcatagcctccgtactgcggaaagaagaaaagtccggccgacagtcccgcttcgttgattccttcggcgatgaactctttctgcacgacggccaatcccaccacgccgtatttggatgtgaaaaccatgccatcagctccggaaggagtaaaagatcgcagacgctgacctcgtgggatgacgacatactcgctctgcaagacgccacgcgcccattcgatagtgcgggattgtacatagctgccatccgcagccgtaagcgcgatgccggtacaagcgatcgcctgaaaagcgcagccgcaaaccgcagccatacccagcaatacattttttgttttcataatcatccgattatcgttacacatttttataaattccacaaattctatgcaaaactcccataggaccgaataaggcaaatacgccgccgaatatctccggaaacagagccggttatccaaaaccgggcgacagcaacaaaggttgcggctgcggctgtgtcagccaccacatacaaccacaggacaatcagccaaataaaacccgtcggacgcacagcctccttattcaacgtaatacgaatttcttggatcagacaaattacaaacaaaaatatcgatataaaaaatcgcccgtagcattacgggcgattcgatttggctattctccaatggcataattcataaagatccgttccaactccgggaggtcttttcgggctgggtcgtcttctggtgtattatggaccaattcgtcgatgcgactatgcaccaactcatattcttctctatcctttattaccccgcgtttgagaatcttttccaacttcttgaaataagccttctcgatcttttcggcactttctccggtcgctgcctcaatacgtttatagatcatacgacgatattccaacggatattcgttgattcctgccatcatttctttgtccaaagttcgcagtaagcgctcatccttttcctcataggctttgtcaatccgttttttctccctttgaaaaaaatttttccgtaattctggaaaacttctgttagtgctttatacaaaatactttaggagaattactcgattttgaggtaatgactttgcaaccattcttcttaaatccgcttttctttgcgttttccaatttttcggcttgtcatcatttgacgccgtaacaactctgatattaagtcgtttagcgtcatttctcccgtttttcgaggttattccagagattttttataattttgtttttaattaaaaaacgtgattatatgcttttagtacccctcctgggcgcagcgacccattttcccgtcgaggagaagatttagagatagagcgaagtacaaacgcggacacggatcgcggacgaacgattctcggatacgatgccgcgaccgtcggacagcgacacattgaaagatataattgccttaacgaaatacaccatgggatttgttccgttcacattcatcgatttcatagatatcatcctggtagcggcgatcatgttctggatctaccgcgctacccggggaacaaacgccccctacatcatctccgggatcatcatgatctacctgatgtgggttgtcgtacgcacgctcaacatggagctgctctccaacatcctggggcagttcgtcagcgtcggcgtcatcgcccttatcatcgtcttccagcctgaaatcaggcggtttttgcagatgatcggcatgcgccagaaacggttcaacttcatcgcccgcatcttcaaccgaaacgacaatacctcggtaacgatcatcgcaccgatcgtccaggcctgccgggagatgtccgcccacaaaacgggtgcgctcatcgtgatcggccgccagagcgacctgcggctcatcaccgaaggcggtatcgccatcgatgccaaaatctcgacgccgcttctcgaaaatatcttcttcaagaacgcaccgctgcacgacggcgccgtcgtcatcgaaggcgaccgcatcgtcgcagccaaatgcatcctccccgtaacgcagagcgacgttcccaaatcctacggtacgcgtcaccgggccgcgatcggcatgagcgaaatttcggatgcgatcattctggtcgtttccgaagaaaccggcggcatctcgatcgcacacggcgggacgatccaccgcgacatcgctcccgatcagctggccaatctattacaacgtcatttcggagccaaccggcaaaaagaccgtcacgcgacgatgggtagttagacactcttcacatcaccataccatgctgctcccctccccgacggaccgtcttattctgcgctgttggcaggatgaagattttcccgcattcgcccggatgaacgccgattcccgggtgatggagtattttcccgctccgctctccctcccggaatccgccgctttcttcgaccgcatccgccgggaattcgaaacggaaaggttcggactctacgccctcgaacgtcgcacggacggggagctgctgggttatacgggacttcaccgggtcacgttcgacggaccgttgtacggccgggtggaaatcggctggcgactgcgcagcgacatgtggggcaacgggtatgccacggaagcggcccgaagctgtcttcattacgccagcctgtcgaaaatggaatccattatctctttcaccgccttgagcaatctgcgctcacaacgggtcatgcaacggctcggtatgacacgattacaggaattcgaccaccccgcactaccaacgggacatcctctgcgacggcacgtcctgtacatgatccggacgaacggatacgcagagacagaaccggaaacccggccggaaaaccttcgataaaacccacgacgccctctaatctgcgagccgccgccggcaaaatttcccggcagcggctcgccctacaatacccgaaaacgttagaccaggaccggagcaccgcacagggaacctttcgaatattccaacaactgtcgtcaccgaatattccatcggtcaagatcgcaaacgggtccctgtcccggcctcccggcccaaactatgaaccggaaccttatcgaaaattcgaccgtgcgaacagcccttcgtatccgaatcttgtcctcccgcctaaaaaccggcccggccgaagttctgaccttatggccaaccagaccgttcgaagctgcaaaaaaaaggccgtggaaaaatccacagccttttatatcggaatgaatcgcccgcttattcggcaggagcagcggccggcgcaggctgctgatcggaagccggaagttccgcctgcggaaccgcaggagcgggatcttcgacgatcatcttctccatcagcgcattggcatctttctcgagttccacgttgctgcgagccaccagaccgcgatccatagccagcgtagccaacagactcaacacgacgatcacgacggccatcgtccacgtaaatttctccaggaaatccgaagtctggcgaacgcccatcacctggttcgaagcaccgaaattggcagccatgccgcttttgggattctgaacgagtacagccagaatgatgagaatacttgcaaccagaatcagaatgatacaaagagtgtataacatgttcctatcgttttaattatttatttgcgattttgtcaataagcgacgcaaagtaaacacttttttccggatttaacaaacttaatttgcgataaatggcgattgcttcgtcgtaaagcccttgggccaggtagatttccgccagatcctccgtaacgaggtcgtcgtcaccgctcaattcggcctcggtgcggacctcttcaacgacttcgccctcctcggccacgatccgatgccccccctccttcaggaaacggtcgatcaggtcggcaggcgaaagcgcacaaagcgcctcccgatcgaccgtgaaccgtccgagcggcagcagacgcgacaccgccgcgatcgacacccgacggtcggaacgcccggtttgaagcacgcgcaggatacgggcgggagtaaaccactcgtaacgcccgacgagcgcatcgagctgcgcttcatcgaccgggcctaccgtgcctccggacatcgtatattccttgaaatccgccatccgctaccagtttgccgccgatgcctggaaaatgtccgtcaccagtttatcgacgatttgggggatcagttcgccctcgatttcattcagcagtttcgaagaatcgaaatcctcgaacgccgaaaacgtctttttccacgacatgctctcgtccaccgcattggtgaagcgcacattgacggtaatggtcaatcggttcaacagggccgtttcggacgaacccgaaaccgaagccgtcgtcgaagtataaccggtgatctcgccttcgaaagcgaaatcgccgccttcgtccacctgcgtcaaacgcgtctggcgcgtaaacttgtcccgcaaggcatccgtcagcgtcgagctcaggatcggagccaccatcggggcgttgttcgggaagtaggccacactgaaggtcttggcatcgggcggaatcgaagcgcccgacaacgaatagttcaccttgtacccgcaaccggccagcaagaggcccgctgcgacgacgatcgcatatttgagtacagctttcattcgattataaacgatatttttcaggagttctcgtcgatgccgagctccttgattttacggtaaagagttctctccgacataaacagctcggcagcggcttcccggcggcggccgttgttgcgccgcagggcccgaaggatctgctcccgcagcacatcggctttggtcagttcccgcgaaggctgttcatcgaccacctcctcgctctccgtatagtccggagaagcgatactgtgggcggaagccggcaacaaccccgccaggtctttggtcggctcggcaggacgctcggcacgctgcatcagctcggtaagcatccgcttcaggtcattgacgtcggcccgcaggtcgaaaagcactttgtaaagcaactcccgttcgaaagacacgccgtcgcccggaccgctatgcaaggccgtactcatcgacgtagatgctccgctttgagattgtgcgggcaggtacttcgtcaggatggcaggcgtaatgagccgcgcctcctcgatggccgaaatctgttcggcgacatttttcaactgacggatattgccccgccaatagtaattctccagcatctgccgggcctcggggtccagagaaatagccggcatacggtactgggccgctacatcggccgcgaacttgcggaaaagcaagaaaatatcctccttccgttcccgcagaggaggcacctggatcggcaccgtattgagccggtaatagagatcctcgcggaaacgccccgcctggatcgcatcctgcaaattcgtattcgtcgccgccaccacgcgcacgttggtcttctgcaccttggccgaaccgacgcggatgaactcgccggtctgcaacacacgcaacaaccgcacctgggtcgaatgaggcagctcggccacctcgtccagaaagatcgtcccgccgtccgcctcctcgaaataacccttgcgggcttcgactgctccggtgaaggcccccttctcgtgtccgaacaattcggaatcgatcgttccttcgggaatggcgccgcagttcacggcgatatatttattgtgtttacgtgccgaataggcatggatcacctgcgggaaaaactccttgccgacgccgctttcacccgtaacgagtaccgaaagatcggtcggcgccacacgcagggcaacctccagcgcacggttgagcgcctcggagttaccgatgatcccgaaacggttttttatggatgtcagatctgtcattcctactctatcaatcctgttttacagccaatacaggcaaactattcctgagtcgtatccggaacggactccacacccccgtccgttccggcagccacgggctccggcacggcaggtgcgagttgttcgaggtattcgcgctccagacgctcgatcttcgcccggcgtagataaccgtaaacgatgacgcctacggccaacacagcgaccacgatggcgatgaccataaatttatcgatcctccggcggggcttggaacccacataggtatatccctcggtggttttaagcggtttgccgtattgcaatccctttacataaggtgcgggtttgcgcttggcagaaacggaaatccgaggttcggaaataccgccgtcgattacaggagaagccttcgcttcggaacgggatcgcacacggggtgcaacggactccgcagacgcagcgacggaagcgggatgaagagctgcggccgaggaaattttatttccttcctccggagccgattccccgacaacaggtcccgcagcagctacaggcgtagccagaaccgcctgaaagacgattgcaccgcccggtgaaagggtcagacgaccgaagccctcgattgcataggccccctcatgctcgagggcatgacgcacttcaaacacgaagcggtcgatcgcaccggcagcctccagatcgttcattccaccctgctgcaccagcaacccgcgcaagatgccgtcgtcgcgcttaagcaactccgaaaagaccacaccgccttcgggaaccttcacgacaaaagttcccagttgcggcacgaccagcctcctgtgctgggtcaggtaattcgttatgattccagtcaacaccgttctgtcccgattaaaattcgacccaaaaatacaattttcatcggacaaaaacgaaaaaattcacctgttttttcaaaatatacggataaaccattgccgatctcgaaaataattacctactttgcatcccaaaataaaaaacaatccgcacgagctactttactccggaatttacaatgtagctcgctcggattataccgcaaaaaacacaaacgagccatgaaagacaagtacatcgacctgatcgaacagacgttcgatttcccgcaggatgaatttaccgtcgaggacaacgaattgaacttccacgacattcccctgatggaattaatcaagcagtacggcactccgctcaagataacctacctgccgaagatctcccagcagatcaaccgggccaagcgcatgttcaacgtagcgatggcgaaggtcgattacaaggggacatacaactactgctactgtaccaagtcgagtcacttctcgttcgtgctggaagaggcgatgaaaaacgacatccacctcgaaacctcatccgcttacgacattcacatcatcaacgccctgtacgacagcggcgtgatcgacaaggaccgctatatcatctgcaacggcttcaaacgcccgcaatacgtcgaaaacatcgcccagttgatcaacgacggattcgaaaacacgatccccgtgatcgacaacaaggaggagatcgacctctacgacgatgccattacccaaaaatgcaaaatcggcatccggatcgccagcgaggaagaacccaaattcgaattctacacctcgcgcttggggatccgctacaacgacatcatcaacttctacaaaaccaagatccagaaaaacaagaagttcaagctcaaaatgctgcacttcttcatcaataccggtatcaaggacacggcctactactggaacgaactgtcgaagtgcctgaacatctactgcgaattgaaggccatttgccccgatctggacagcctcaacatcggaggcggctttccgatcaaaaactcgctcgacttctcgtacgactacgagtacctgaccgaagagatcatcgcgcagatcaagaacatctgtacccgcaacggaatcgacgaaccgcacatattcactgaattcggatcgtttaccgtcggcgaaagcggcgcgaccctctactcgatcgtcaatcagaaacagcagaacgaccgcgagaactggtacatgatcgacagctccttcatcacgactttgcccgatacgtggggcatcaaccagcgctacatcatgctggcgatcaacaactgggacaaagaataccagcgtgtgctgctgggcggcctgacctgcgacagcgaagatttctacaactcggaatcgcacatcaacgcgatcttcctgcccaagctcgaaccggggaatccgcaatatatcggcttcttccatacgggagcctatcaggagtcgatcggcggcttcggcggcatccagcactgtctgattccggcccccaaacacgtcatcatcgaccgggacaaggacgacaacgaatactacacccgcctgttcgccaaagaacagtcctaccgctcgatgctccgcatcctgggatattgacggaaacggattctcggacagaagattccgagtacatgctccgaatacgaaaaattcatcatttccgaagaaacccatgaaacaaaagaaaaaatttattctgataacgctttcagtaataaccatattattgttgctgggatttgggaccacgagatgttatctttcgtctaaatataaaaaaatagcggaacgtatgagatctgattataaagcggctccaaaccagcagcagcttcctctttcattttacctaacgttcggttattttcctcgctcgatggacgaagccctcgatttctatcatcgggagattcaaccggatgagtctaaagagactctcagagcacaacaggtattgcaagatccgttttcaagagatagttgtgaaatacaatacgtccccctttatgattacgaaacaaagaaacctgtatccttcattctattgagtgctggtgtcgatggcaagatggataacaaaataacaccgagcgataccctgtatctgaataactggtgggcaaaactcgatgtatataattacgaagaagctgttttgctgcaagactattggattaaatgggaagatctgtgtcgtgcatatggagaagatatagaagatatagaaacactcctaaaatataacccgccttatcccgaacttgcattacattttaccatgagaaactatctgtggggaaagaaagattggatcatacaattgggactcttagaataatatctccagcatttccttcaaataagagcaacccctgcaaccatattggttgcaggggttgctcttccgcagaacccgaattccgctcctttcagattttcattaggttatcataatataactattcccggcgaccgttcgcatcacgcccccgtcccgaaacacgtcatcatcgaccgggacaaggaagacaacgaatactacacccgtctgttcgccaaagaacagtcctaccgctcgatgctccgtatcttgggtattgacggaaacggattctcggaccgaaaattccggaatgtacgacaccgatacgaaagcaccggcttccttcaaagtttccgaggatttacaaaacaatgctgtaacctaataagttacggcgttgtttttttatgaggtaatgatttagaaacgcaagtcttgaataaacttacatcgaggttcatcctgtcaaacaactctatacaaatatagtgaatatctgataaaaaagcaaatagaatttttatctctctattttccgatttatggcgtacatcagcgtcaccgccgatcattttttcctttgagcggactggatcggtctggagcggacatggggatcgttttctgaaggcttggattatcttgcacatccttaacgcagaaatcacctaaaccctcagcattatggattgcgtccttatggaaacgagcgcctataaagagatgcaggcgcaccttcaacgtcttctggagcgagtgtctgcgctccattccctctccgcccaaccgacaactgtccggaggcttacggccgaggaggtctgcaaggccttgagcatcaccaagcgagccttgcaatactatcgctccgccggcatcatcccctatacggccttggggaataaagtattgttccgggacgacgacatccggcaacttctggaaaagaacctgataaaaagcctgtagcatgaccgaagagatcattacccgcgacagcgccgcgttcaaggaactgcgccgcgacatcgtcaaagccatccgtgccgtcgatattctgatcgacacgcaccgcccgaccatcggaaatgaactgtacctgaccagtgaggagatttgcagcatcttcagcatctcgaaacgctccttgcagaattaccgggacaaccgccaaatcccttatactactcttggtggaaagattctttatccgcagtcatcgctttataaactgctggaacagcattatatgaaagcgcagcgctgatgcggtctgtgaaaaggggaagatcatcactcttccccttcttttttggatgtataactgatatagttgctcggatggatcacgcatatctgcccatccggtgtcccgaaatcaatgaggatcggatatttgtaaagcggcagatagtatttccgtccgaaagatttgcggattgcctccgcagccagcaggattcccgagtcggccgttataggacgttcgtatccgggatattgccgcatgatctccatgcggcatttattgatgtcgtcgagcgtaaagacctctccgcggatgatgcgcagcagacgcaaggtaagttcgtattcgtgggacaaatttcgacgttggtcgccgtttggagcttcttccaactctttcttcagccgttcggctttttcttcgaatgttgccatatttatagtcttttttgtgtaatgattctgttatcggcaaggggcagtaaaattccgaggcctttgccgtcattcatcctgcggtagaaaatcccggacgtatttcctggccgtgtaaatgtcgcgttcgatggtaagtccgaacggcagacgaagatatgccagctcggagagcatcaggtagcccactcccattcgtggatatgacaataaccgaacaagcgccagtcgtcgccttcgcgttcggcttcggtgatgagccatgtgcccgagccgcaggggttgaaatacttgacgaggacttcggcatccattcctttcccatcctgtgagtggataggatgtttctcgaatttcgagatgatctgttttgtgagcagtgtcatagagaataaaatttcagactgcccggaacgcccggacagcaagagccgaatagccgccgtaagcgacaaagacaaggcattgccttgacgtgtcgcttacggcggctattttgctggacgggtcggcgtaagatatatggtgattcaatattaagacgacgatgattcactccgcaaaacttgctcgtttcgttcggattcgctatatttggattgatgtaatatatccgagatcattaacaatctttatacatttctacaatgcctttacgtgcttatatagaagacaaagaaattgtttccattgatcttaatgacgaagaatggagtgctttgaaagcccgtcttaaagccaaagaaatcgttttaacattgccgtgctgcgggcaagagggctttttgagaacaagcaacagagggttgaaacatttcgttcatctgaaatctgcaaatccatgtgattggaaacccgagtctgcagagcatctcaaagcgaaagtcgcgatcatggaggcttgccgggagcagggatggaatgccatccccgaattttccgaagcggattggagggcggatgttttggctgtacagggaggcaagaggatcgctttcgaggttcaatggagccggcagacttatgaagcaacccgcctccggcaggaacggtataaggcatcgaacgtaagaggttgctggtttttccgcatagcccccaaagaaatgtcggattatgacaaaactttagttgcagacaaagagactcctgcgttcaaaatattcaaggacgaaaattcaaacatacttgcccaagtagggaaagttcaaatgccgttaaaagcattgataagtaatttactggcgcgtaagttgaaattttgcgagcatatcagaatagctcctaagcaaaagattaccatcatcttctttgaaatgaaatgctggaagtgcgggacgctgcaatactgctatacggtagagccaagtctgaagagcgtctgcaactgcgatttcgatgtggagcggtcttcgtgggacgatcatgatatagacaagcatcctggggtctatgccgcggtacaagatttcttacagacggaagaggggcgacaactcaaggtcggcccggtaaaaaaacggtatagccggacggttgccgatagctacctatcgcacggctgttattattgcgacgctattttcggcgatttccatctcatagaagaaaaattgtatgctttcactggagtctatactattattgacaatgccttgatgccaaaacctatatggtggattctccgtgtgttccagcacgtcctcctttttttattggggttatacttcggttaatgttcgttgcgggcggaacatttccgcccgcaacggcttactgcttcctcaaggtaggcaatgctcctttaagttcgtaacgccattctgagcctgcgttctgcaaggcggtgttcatggcatcaacggcttcctgccaggtaacgacagagccgtccaccttcgtggcttcgggggcggtgctttgctgattgcggccgatgccttgttcctgattgttcttccagtagcaggcggtcacggcggtgtagttatctccaaacaagccgccgatatgcacattgccggtgcttctacccttactatttacgttgcccgtggcatagcaggcaaggacggtgcttcctccgtttaatcccactacaccgccgcctgagagatccagtggggagttaatttctaaggtcacgttgcctgtggcatagcaagcggtcatggtgccccatttttctcctaccacgccgccgacatggcgcgttcccttcactgtggccgaggagctgcatccgatgatggaaccgctgctctgttgtccacccaccacaccgccgacacaattcgtgccgctgacgctgcccgacaccgagcagttttcaatggtgccccagctatatcctaccacgccgccagtattgcctgacattaacacgtgattgcttgttatctgtatgccttccatcaccacgttcttcaccgtaccagctctatcgagatagccgaacagacccacaaattggtcatttgtcgtaacggtcagccccttgatggtatggccgcggccgtcgaaggtacccttgtatcgcttttcgtagtttgtgcctatcggcgtccagcctttgcccgtcaggtcaatgtttttgccgagggtaatgttaatgtcggtcttacctccgttcactaattcggctacatttatcagaccatcggcggaggtcacggtgtagctgccgttgccctctatggtatatcccgggtcttttgccgcagcgagggagacggtgtaggtatattcaccgcccgcctgccagtcggcagcattcttcatcttataaacgaaggtcttggcgttggtgaaggtgcaggtaatgaaagtcgtgccagctgccacactttgcggggctacgagggcggtgtaggtgttgctgcccttgtcatacagggtgatttcggccgggttgccgccttcggtggagagacccgtcagccgcacggatgccagcccctcggtgtagtccgtcagaacgatggtcactcgcgccgtgcggtgggtgaagcggagcgtggggctgccgtaggtcaccgtctgcccgtcggctacgatgaggtcgctgccctcaaagtctttctgggtactttggttggcttttacctttaccgcaggtggggttgtctcgccatcggtgtagggccaccacgctgtgacggtgatgttgttgtggttggtccagtagtgcgggtcggtggaggtcagcgtggcgctggcggggtcggcggtggagggcgtcacgtcgtacgtcttcaccatgccgtccatcagcactgccacgctctgcacaccctcccaattgccatccgcgggggcacgggtgccggcgatggctttcgcggcgggattcagccccgtggcggtgaagacgatgggtgtgccttccgccccttccggcaggaagcccgcttcgtcctgcgtgcaggcggcaaggccgagcagcagggcgatggctgcggatgtatggatggttgctcgtttcatgatgcgtgtcgtttagggttcgttattgtctcttttgtaatacgggcagaccgtcggtgccgagtatccactggtagtcgccagcggtgagggcggtgttcatgccgtcgacggctgtctgccatttcacggtcgcgccgtccaccttcgtggcatctaccgttcctccttcaatacggaatactccttgcccggcattgcctccccaataacaggaagttatatcagcgtagttataacgcactatagctccattgttagactctttcaatgtgccgtcgaaccagcaagcgatgatatcgccataatttgattcggctataccacaagttccaccatatgatgcagaaatttttcccgtcacagagcaggcaatgatttggccatgatttcggcccactattccagcagtatttccactactgccatacagattcacatctatgagttgtaggttctttatcactccacgttcacttaagagtgaacccaaaaatccagtattattcattgctgaagagttaaatcctgtaatgcggtgtccctgcccattaaagacgccggagtagaatgtaaatatgcctgaccgtgtccattccttacccgtcaggtcgatgtcagcggcgagggtgcaatttatcgattcatctttttgtgaggcttcgttccatgccagcaggccgtcggcgttatagaccgtgtaggtcttggtgttgctgtcgtagatgtagcccaaatcctcggctgtgccgctctcgccgccgccgtcagcccagctgccgatggtgcaaccctctaacgtcaggccggtggcgttcaccttgacggtatatttatagcggctgcccgcttctaatacgacgttgttctgcggacggaagtagaaggtgccgctgccgagttccaccttgacgaatggcttgcctgccgcaacggtctgcggggcggtcagtgcctcgtaggtgttgccgcttgcgttgtaggtcttgatggcagtcgggttgccgttatcggcggacaggctcacgaggctcaccgtggcaccggcgacgctcgtgaatcccgtgccgggcttcagttcgattgtcacgcgtgccgtgcggtgggtaaattcaagagtcggggtgttaaattccaccttccggttctcagcagagatgaagtcgctgttctggaagtcagccaatttgctttggtcttcggccaccttcacggcaggcatctgtgtgatgttggcattattgaagggccaccatgccgatacggtaattgggtcgcggctggtccagtagtacgggtcgttctcgcgtgaaagcgtggcactcttgaaatcggtagaagccgttacggtgtattcctttaccgcatcgcccatcttgagtgccacggaagtgacgccctgccagtcgccgtccacagcggcacgggtggaagaggctgccagcggcgttgcttctacggacagtccggtggcacggatgaatacagggtattcaccttcgggcagacggttatcgccagcaagttcgtcctgtgtgcaggcggcgagggcgaacagcagtgcggtggctgcggggataaataatctatgtctcataattctttattctaatcgattaattattaacatcctacaggtcagcgcccacttctccgccgtctatatcgttccactttgcaatggtggcttcgctgacttcaaggactttgttgcgtaccttgacggtataggtatagttgttgcccgcctgcagtgcgccttcgggcacggtgagtgtggcatgatattcctgacctttgttattcacaaccaacggcagggatgcaactgtctgcgggaagaggatgattgatgacgtgagattgccgtctgccagattcatggccagttctccggtctgtgccccgttgtctgcggtggcaataccgtcgaccgtgttgaacgtaccggtgagtaacaatccgttcagcgtgtaacgttcaggcttgaccacgctgaaatccacgccgtcgcccgcctcgaaggtaagggttatctggctcatgcggtggtggaaggagttgtcttcaccgcctttggcggttttgtcggtgaagcttactaccgggttgtttttgtctcccgtggctcctgaagcaaagaggaagtcgatggcaggcttgttctgctgcgccgtggcatcggtcgtggctgtgaggatgcctcccaccgcgttgtacggatagtaggcgcggaaagtatgggtctttgtatcttcgatatagataacctttccttctgcctcaaatttcccgtttttcaggatgaaaggcacgttgccgtactgggaatcgttgccgatgtcggtgatgccgatacggtcgccggcagtccaggtggttccgctggcgcgggtggcgggggcgatgtcggcggtaaactgggcggccacggggtcaccgttcaggttctcgttgtcgttgttgcaggctaccagtgcgagggcgagcgctgcaagtgcaaaaaatcttgtcttcattatatctataattttattatttacaaatcagcatttacatcatcacctttcacttcttcccagccgttgatttcggctccgtccacttccatgccttcgggagtctcaaccagcgttccgccgagggtcagcgatttgccctttccggtgttgaaatccttgagggcttccgtgaggtcgcttttcagcgtggtggggctcgggttgccgtcagcatagcggatttcacccgtcagcagttgttccgtgccggtcacacccagcagccgcaccgtggctttccacttgccggcatcgtcaccttcggtaatcttggtgaagggcagcacgacgtttgaagcggctccgtaggtatcggtagcgaagtcgagtgttccggctgcacccgtcagatgggcaacaatctccgtgatgcgtccggcggcatcacccgtcggtttgatgatgagcgtcagttcgcgtacctgctgcttcattgcggcggtcagcggatagtccttgtctttctcgatggtcacctgttccgtataggtgaagaaccatcccggggcattgttcacaaaggtatccgtgcctgcccgggttcccgtggctgcggcaatggtggctgtggtgccgttcaccgtgattccttcagtcgggttccacaccgcaagggtgtagctgcccggagcaaacagatggtcgggggcatgggtggcggaagtctccgtacccgtatagtcacccatggtgaccgtccacgtggcaggtatgtcgataccctcaccgcgggccgaccagtcggctgtcaccgcaatcttcccgctgtcggggtgtggcgtgtcatagagcgtgtccttcacgcaggaagagagcagcacggcggctgccattcccatcatatttatatattgtcttgctttcatattctattcctccgtgttagaataacttccataccaatgtcacaccggcattgatggggccccaccagtcctttgtttcgttgccgcggcgtacacgtacaccgtcgatgacctcatatttctcatagtcggcattcaggtagcccagaccgaggttgaaatcaagagccagtgccttgttcagccgcagctgatagccggcggtgatgccgccacccatcaggtcgccctgcttgcctgcttcggagaacttgtagttgaactgtccggccttgaacagcgcgcccagataccaggctttcttctcacccatatagtaacgcacttccggagccacttcccagagtgcatagcggcggtccttgtcgctccacgtccatgaagtccacgagccgtttacggcaatgccccacgatgggcagatgcgccattccacgccaagatctggtgtcagggtagcccagcgcagcaggttggcacgcagggagagatgataatcagttgtgattttggtttccgacggcgtgtcggcaagtgtattttgttgagcggctttctcggcttctgccttttcagcggcaagtcgggcttcttccgccttgcgctgctcttcggcaagccgttcctgttcggcacgcttctcggcttccagtcgttcggtttccgccttgcgtcgtgcttccgcatccgtcgcggcagttccctttaccggtaccgtcaggcgcacggtgacaaaatcaccctcagtcgcatggttgcgggtaatgaaattctcctcttttatttccgcacggataatcagttcggatttcacacggttggcacggatcttcgccgtggcaaggttctcggcttcactgcccagtgaattacagtagccgtcaaccaatagcggcagcttgccgtcaagaattgtggttttgttgttttcgatacattccaacagacgggcaagttccgtgtcattgccattccaaggcacgtagaacatgtccttctgcggaacgaaccggaaggtgtaggtcgtgtctgctttctgctgcgcaatgacaggaaaagttaccgtcatcagccacagaaacagggtgagaaaagtgatttttctgctcatataaacttgaatttattatctttgtcttctccaaaggtaataaatgccattcagcgcccaaaatattacaaaaactttttctgttgaaatacagcgttttataaaaattgtcgtttgagcacttttcaaattgtcgtttgagcacttttttttgtcgaattagcacttttttgtcgcttgagcactttttgaaaatgggcttctgagacctttttcatcggctttttaccacacaaattattccagatttgcttttttccacttgccaggcgtacatccttccttctctgtaaatgatttgataaagttactgcgggaaagaaaaccggaagactcagccagcttctgtatattgatttccggatgctccttcagtatgtttttcgcatactccaaccggagaccggttatccattcgcggaatgtcattttatacgtagtcttgatataagcggaaagataggtacggttcgtatgaagtatttcggacagttcttttatggtaagtccctgctggacataaccgtctgtctttatccagttggccactttctctataatttctgtataggacactggaacttcctcttctgaaaccatttcgggttcagttcccgaatttgtcagaagttcttcttcagattgtatatcctgctcaaacgcattttctacctgttcatagaacagcaggtaattctgataacagtgaaaaagataactgtagaataggattgatgaaaacacccagatatatacatatttgtcaggcaggaatgtcagcaatccgcatccgacaccgaagataagtgcccaataggtaaaggtggacagccattctatatatgcccctatatcatctgcatgcgtgtcatcgaaaatcctgacggctctgcggtatgcgacaatgaccctgcgggccagcacaagcccgtaaatcaccagccatgctgccaaagccagcaatgcaacattctgcacggcgccacccggcagcagcaataataactaaaactattcggcgtagagcgtatttccaactttcagatacttgcagatacttttgaaagagacgaaaccatcgacatcgccaatctgttcaaagactgtttcggcatttggaatcaggaggacattccggtagaggatatagtcctttcatacagtgctctcgacggtcgtttcctgaaatcggttccgctgcatcattcgcaaaccatccttaccgatacggaaaatgaattcagaataagcgtccggcttcgaattacaaacgatttcgtgatagagttactctccagaagcacttcgttaaccgttataaaacccgcttcattacgccgcagagtcgcggaaatatatgaaaaagcattgtatcgcaatatggacaaataatatgcaacagcctgaaaaggggacacttagttagtattatgtttcgatatttttgttatctttatcttgtactgcctgttgcaggcaatgcagacatacataacacgggaaagtgtttggctttattctcaggtaacgaatctgacaattcaaaacaagtagagaataagctgatatccttacgtctcaaacaggtgtgggctgttgcttatttatacttgtgggctttgtcagagcctgttaccttaattccacacttgaaccaatagcgtggaaggagttgctctttacagttatcgccggttgtcagctgcaaacaaggaggatggacggggagtcagggcgggcaacgagattgccaagcatttcgcagggaacaacgtggatgtcatcatttatgccgtggaaaagtcgctggactcgtacaagttcaacctgctgcactgcaagcagacgttcatctcgcagttgaagtccggcgcgttgggtgcgcgtaccatcgacgagggggctatggacgagaagtcgggcatgaacttctcggaatacatggcgttgctctccggcaataccgatctgctcgataaggcgaaattggaaaagaaaatcgcatcgctcgaaggggaacgcaagtcgttcaacaagggcaagcgtgattcggagttcaaattggaagccaagacggggaactgcgcaacaacacggcggtcatcaatgccatgacggaggactggaaccgtttcctttccgtcgtcaagaccgacaaggagggcaaccgcctgaatgcggtcaaggaggacggcatttcttcttcggatgagaaggttatcggaaagcgtttgcaggagatagccaagaacgccacgacgggcggactgtacaatcctgtcggagaactttacggtttcccgataaaggtggtcagcgagaggatgctcaaagaggggctggagtttaccgacaaccgcttcgtggtggaggggaactacaagtacaagtacacctacaacaacgggcatctggcgatggctgacccggtggccgccgcacgcaacttcctgaacgcactggagaagataccctccaccattgaccagtacaaggcgaaaaacgaggcattggagagggatattccgcagttgcagaaaatagcgggcaaggtatggaaaaaagaagataaactgaaacagttgaagtccgaacttgccgcgctcgaccgcaagatacagttggagcttgcgccgcccgtgcccgaagtcgccgaaaaggagaatgacgggcaggaggtcaagccggatacggaaggtgtacggaacgtaccgtcacaaccaaccgaagatgctccgcagatacgcagcccggcgaatgaccgaagtccgtctgggaatttcattgccgatcatatcgttatcggacgggcgggattcgtatgcaaaccgaaaggaataaaaatgtgaacaagtgtgcggatatgtgtggcaggattagggatatatcatcccttttcctgccttttttcatcaatatgccatagtggcaagggaaatagggtgttgaaagtaaatcgtcacggcaaatccgccatattttcagtatttttgctaattttacaataaaatagttaggcataaaaaatggaatcatctatatacagttattcactttgcattgcgctaccgttgatgtcgttcttcggcttttattttttgctggcttcaaccccggaaaaagccattttcaataattatctgcgttcccggcgaattatgggggtagccatactgttacttgcagccaactattcggtacatttcttttttggaatcaggttcaagaataccgatgccgccatcctgatgaacctggccacctattttttgtgctactggctgttcagttcggccctcaccactctgcttgaccgcttttatatcactaaacgtaggttacggacacatatctgtctatggatactgttttccatcctttccggcatcgttctgctgttgttacccaaaggtggtttacagacaacggcgatgtttgccttggccgcatggttggttatctatgggctgttcctgacccgtaggcttctccgggcctatcacagggtcatccgcattttcgatgacacccgtgcggacgatatcggtgcctatatcaaatggctctccattttcacctactgggctatcatattcggtgtgggatgcggactgcttactttcctgcctgatgaatacatctatatctggattctgtcatcggtaccgttctacatttatctcttcctttgctatctgaactatctgctgttttacgaacaggtggaaaacgcgatggaggatggcatgacttctgaagaggaagacctgtgtgacacacacaaaccgggaacaggcacagaggcaggatacccctttttccatgccgaaatagcgaaaaaaatcaaaggttggatcgatgcggacggttatatccggcccggccttaccataaaggagctttcagatgtgcttcataccaaccgcacctacctgtccgggtacatcaaaactacgtatgacatgtcgttccgcgattggattaccggacttcgtatagaatatgcgaaacgtctgcttgcgcgatatccgaggttgacgatagccgacatctccgagaaatccggttttttgtcaccaagccattttataaggctgttcaaggaaaatgcaggctgtacccctgttaaatggaagaaaacagaggcagaataatacggtgtgtgtggatggggaaaatagcccaagcgacaaaaaatagcctgaacgacaaaactgaaatgttctaaaccacaaaaatatgcgattctgacaattgagacaatttttataggcaagaatcgggcagaataaaatctattcgcttattttgtatgctgatattcctaattggaaataaaaaagcatataaaaatgagcaaaagaatcttattcttcattttgttttcgtggctggcatcggcagcttttccggcttttgcgcagcagaaaacagacacagtttacaccttccgcttcgtgccgcagaaggacatgttctatgtgccatggaacggtaatggtcaagaacttacgcgccttctagagtgcatcgaaagtaacaaaccggacatagtggagggacggctgcctctttacgtggacggatactgtaactccggcaagtcggaacgggcaagccttgccattgcgaagatacgttccaaccgtgtgaaatcagagttgattacccggaaaggactgcgtgaaaacaacttcatcacccgtaaccatgcctcggatggcgacttcgtgacggtgcgtatcatactgccgaaagagaaagtgccggctattgtggaggatacacatcccggttacgaggaagaaaaggaacagtcactccgtgaaaacgacaaggctacagaaacaatccaagacgcagaggagacaaaggcatccttcggacaggaaaatcagcctgaatccgtactgccggcatcatccacaactttgggattatcactgcgtgccaacctgctgcgttgggcgacgttcacgcccgacctcggcatcgagtggcgcatcaacccgtcatggggaatatccgtgaacggatcgtggacttcgtgggcgtggaatgaaaaggacagaagatacgccctttgggaagtggctcccgaattccgccattatataggtaaggagaagcgtggctaccttggggtaatgttcaagaccgggcagttcaattataagctctccgcgacaggcaaacagggagaccttacgggtggaggcatcaccggaggctaccaactgaaattgaacaatgccctctcgatggacttctccttagggttgggctatatccatgccgactatgacaagtatgtggtcatcaacggcgtgagggtaaggcgcggcagcgaaacaaagaactggtggggccccgtctcggcgggtgtcaccctggtgtggaacatcttttagcggaaaggaggaacaatgaatacaacgacaatcatacgacagataaaggaatatatgggagcatacggaaaggcttataccttattatatctaataggtgcggtgaccatactgacctcgtgcgtgaaggacgacctctatgacacgccgcaccccgaccgtggggcggtggtcgtaaccacggactggagcggaaagagcaccgaggcggacataccgcaggcatacacactgcgcatcggcgggagggaacagaacgtgagcgcggcgaccaacgtgttcgacgcgctgctcgcgcccggtggctacggtctgacggtgtacaactccccggaggggattagtatcgacggaaacaaggcaacggtgaatccggtggatctgacgggtgcaatagagccgcaccccggctacctcttcgcctcgcaccaggacatcagcgtcgtggcggacgacaccctgcacgtcaccgccccgatgagacaatacgtgcgcaggctcgacatcgaactgaccgccacggaaggcgactacagccgtgtacagtcggctacggcaacgctctccggcgtggcttcggcagcggatatggcaacaggcgaccggagtgtagcggcacaagtaacaaacgctttcaggcaggacgacaacaagttcacaatctttttccgactgctcggcatcgtcccgacggaaacgcatacgctgacggtggacatcactttcaacaacggtgacacgcagcgggtagtgagcgaccttaccgaggccataagggacttcaataacggcaccaaaccggttaaactcacgggtaatctgcttttgcccgtagaggccggggtaacgggcgcaaccatcacgggctggaacgaggtagaaagcggcaatggggatgctaactgacgataaatattttaatcaaaaaaacaagattatgacaatgaacatgaggtttttcattattgcagcagcagcaacgctattggctgcgtgtacacaagagaacgaggtacagaacaatccggtggaagcacgaatcacggcaggcgtgagcgggccgaagacccgtgctgtggacaacgggtggaacgccgaccgaatcggcgtgatggtggtggatgcccctggcacgaccacgaccatgggcggcaagtacaagaacgtgggatacgcgaccacgagtaccggcaccaacgcggactttaccccgatgacggcgggtggcggcatcttcttcgaggacgctttcctcgagtttacttttgccgcctacgcgccttacgcatcgggcgcaaacgcctccaccctgcctggtacagacgggaagattacggtaaatacaagcaaccagcccacgaccacggaacaggagaaggtggactacatccatgccacgggagccaaggccgataaagacagcccgaccgtcagcttcacggacaacaccgccgcgggcggcagcgactgctccttcaagcacaagatggcccgtcttatcctcaaggtgcaggtgtcgaacaccgacggtttcgacgacactgccgtgctggaattcgccgactacaagctgggcggcctggttcacgagggaacgttcgatgtgaagaccggtaccgccgcgaccgcgggcagcgttgtgagcgactggatgttacgccagtgcaccggtgccccgaagacggccacggacaagtgcgtggcaacctttgacgccgccacgggcgtgatgactttcaccatgatcctgctcccgcagacactcgccaacgctttggtgcttgagatatctcccgatgacggggaataccagagctactccaacaaggacatgatcaaacccgcgttggaggccggttattcttatacctacaccatcacggtgaagaagacggggctgacccttagcggaagcaccatcgaaaactggaacgacggtggtagccatgcgggtgatgcaaaaatgtagtgtgtctgaaagccactgccgtgcatcaggcgtaagacggaggcacgccatatataataaatggtgcggcagcccgcgtcgcaacgggcagtggcacaaaacgaaataaataaagacaatatgaaaataataaggaacatagcgagaaggccgtggccgcgcatcggcgactggttgccggttgtgatgctcatctgtggggtgctcgcttcctgtagcagtgaggatgaaagcaccgcgcccctgcccgacggcaagtacccgctgcaactgacggcggaggtggcgcagccgcagacccgcgccggaggtaaggatgcgtggacgggcggcgaggagattagagtgtcactggaaggcgtgtttggtaacaaaacatacgtgatggacgcatcgggcaatgcaagcccgaaggatgccgataatgccttctattggaagaacaccgatgaagcccgcgtcagtgcatggaccccggacatagaatcggaaacggatatttccgaccaaagtggcgggtacgccgctttcgatgtcctgtacgccagtgccatagggcgttatgaccaagccataaatctccgtttcatccaccgcatggcgaaaatcgaagtaattctcaaagctggcgaaggcattacggaagaggagttggagggtgcgaccgtcaccattttcggagacccgctaacccactcaaccgctggcttggttgcaccgggagaccaatcggacggcgagataaagccctattacgatgccgcaacgaagaaatacgaggcattggtgccgccacaaaacatgacgggtaagccgctcgtccgaatcagcatcggcagcaatgactttacttacactcccgaaacagaagctgccggcaaatttgactttttcggtggcaagcggtatgcctacaccatcaccgtgaaagccaacggcattgatgtgcagtcggtgaccagtggcacgtgggttgcaaatggcgaggaaaacgtcacctccaaaagggtaaagcaaagattcacggcggatgaacttaaaatcggtgactacttctactccgacggtacgtggagcgacggcggattgcgcaaaatctatgctgacggcagtatgcatatagactattataaacccggccctttacgtggcaagacagtcgtcggcattgtttttcagacggacaagagccgtatcggtaaaaaggaaaaggagaagttgggcggtgaagacaaagtgcatgggctggttatggccgttaaaaacgcaaacgcagcagagaaagtcatatggagcaacgaatcgcggtacttggatttgttgaatgactgcgtatccaaatccaataattattcggacattagcggatacggcaattgtgaatctatccgtagtttagagggcaacttcgacaagtatcccgcattacaggctgttgatggttacaacacgacttgccctgtccccacgaccacgaccggctggtatcttccttcctctggccagtggtgggacatactgcagaatctgggcggttgtccggctttggcggatggatatcagcaaacctcgtcagacatcaatgaattcttctggtcgaaccaaggaaatgttcccgacgctttgaataaatggatgtggggtatcgacggttgggacaaattctcctattaccatcagttttggtcgtcttcgaagttcaagggcaacacaatgcggtattgggtagcaaattctgatgatggatggataagctgccgatggggtaatgttaatttccagctctatgttcgtcccgtccttgctttctaatctgtttaatccattaaaaatatgaagatacaaaacatataccacctcttgcaagccgcattgctcctgctgcttgccgcctcctgcacgcaagaagagttccctgccgcacaagacaaggcgcggcaactcaccatctccgttaccgacgggggatacaatacatcggctgtggacggtaaaatcacccgtgccgtggagaacggctacaccaccgagttcaccgagggcgatgcctgcggactcttcatggtccgcggcttatactcggataagaagatgatttattccaacgtgaaactgaccgcagagagggatgccgccacgggcaagctcacatggaagcccgaggccggtacgacacttgagggaggactgtcggatgaggaatactacctctactacccctataaagcggacttggacgacacggtcataagtaagttgttagagtacgcaattatgaatccccaactccctttcttctatccgcttgttaatcgctggccggtggaggtcgaccaaagttcgtatgcggattacaccgcttccgacctgatgacagcttcttgcacacccacattggaaaatggtaaacttcggctcgatttcgtcatggctcacgaattacccttggtcgttatcgagatgccgaagaccgtatataagtttaccgatgcccggattcccgactacaccgtgccttctgccgccacgttcacaagtgctgccgagccgctgcgcatggccgatggtacataccgctacttggtgcccccgtccatgcctgctatctggggaagttatgacgatggggacagggagtttaccatcaacacgtccgcaccacaccctatcaaaggggaatacaagagatacaaggtggacggcgcagtggaaaccataaggaactacattttgcaggtcggtgatttcttcctcgccgacggcaacctgatgccgaattatgccgaagcagacgaagtacggacagtcaatgtggtaggcatagttttccaaaccgacccgagccgcatcggtcaggcagaaaaagataagttgggcggcaatgtccacggtcttgtcatggctgtgaagaatgctacgacattccaatcgtggggactatttggtacagacgaggatctggcgaaatgcgagacgaaagcccggaactacagcgacatcagtggttacggcaattgcgagcatatccgcgccaatcgcggaaacttcgaccgttatcccgccttcaaggccgccgacggctacaacacgacctgcccggttcccacgaatactaccggctggtatcttcctgcatcaggtcagtggtgggacatcctgcaaaatttgggcggttgtacggctttggcaaagccggatgaacaagcctcatcgcaagacgatgatttcggttggtcaggtcaaggcgatgttcccgctgctttaaacgcatggatggagaaaattgccacagacagcaaggataattttagaagcggtaggtggttttggtcgtcttcggagtactcggaattcttcgcacggtactggtacgtgcaatccaatggtcgcgtgggctgttactgggaccgtaaggacggcagcagcgtcggtgtgcgtcccgtccttgctttctgaggaaccggtgtactgacgactgtttccaaaagctgttaggacagtattcggataaagaaaggaggaagtgttgtatgctcttctttctgttgggataagaagaatagaaagatattgttgagttttgttgcaggtcgagcttgcaaggtctgccgtggtgagaatttgcttttttaaaggataagaagtgatacgtatggaaaagaaacgaatgccattgcagcataaaatcattttcggatatatcatcttagtggcggtcataggcagtatgatcgccattttgatatatgagtggcggcagatgcgggaagttgaaggcggcgtggcacggctgtggaggatgtacgaggacatatacaccacccatcgccacgtcaccgggcttgccctgcaaggcgaggctgcggcaggatggagttgcggaaagggacaaataccatacgcatcgcatgagaacggactgtatgctcggcgtactcggacaacggtactctacaatcatacctggcggcgaaatagacactctgcgtcgctttcttgccgaaaaagatacaatactcgtggcgataatggaaactcatagggaacagtggaagagggctgccatgggcaagcggctggcaaaagatctacccggagcggtgaaagaagctacccgcagaggcagtgaaaaaacggaagtactcatcgcaacggtcgcagaatcggaactctccggcagcgtcatcaccgagcccggctagacggaaccagcaaaaacgagacttaccgtcctgtacgaccgtatcccgaaacgctgtacgaccagcgggagaggaaactcaaaaaaatggttctcctcgaacagtcgaggagaaccacctatcaaaagtacaatattctatcttctctcacctctttgtgtttacttttacgagagtagcagcgcatttttatccgctttacgtttatctgcccggcagtttgcagatcctgtcaggaatttgcacgtgtacgccttggcgtcggatattcatctgtctattgcctttttagccgctttcttcgttttagaaagtcttggtggaaacaccatcaaaataatcctggaagatgataggtcctgtgattgtgcgcttcgatgtatagacgaacttccgcacaggacggaaccactcggcatccacatacagaatctggccggtgtacggctccaaaatcggaagggatttcgatgacccgcccaaacgcggtccagtaacccaaaccctctcacccggggcataggtatggttggtactcatttcttggtgaggtatataacagacattgccaaaataggatctgccgtcaccttcgccccacgaccttgcctgataccagccgagctggtgggcgtgcgtgcacttctcggtcaggtctatggcttcttcgatggagcaggtcttctctggaaagagggtcccgccggaagaagcgttcataagcccgagagcctccataaatgccatggcttccttggcccaaggggcaatgcggatgtgatcggagtatttatccaacccagaaacgaactccgtatatgagtatactccgcactcttctatatacctaagggcacggtacatcacggcggccatctcttggcgggagacaggggagtcgtctgccggggcttttccgccaagagccttgtccaggccaatggaggacgccgtggcctcgctgccggtaagttctttcacgagatgctcggccagcgagttgagctggcggtgattcaggggaagtgtataatcattgccaaggacactttcatccaagaggttgtcattgagggcgaagttcacactactctggaaggcaggactcatctttgagtccgacttttttttgagaatgaacatccccggctgtgccgtggtcttcagaagggcactctcctcgaactgttttgtcatgtcggccatggcgtccctatagctctcgtatgttccctctgtgccgcttgcctgccattctgctttggttatgtgcctctggtcatagccttcggagtgtccgcaccagatgcaactgtaccaccatacatgctgcccggcggagttgactccgacataagcctggtcatcagcaacaggctgatcatactgatgagcccggacctcccacgttggcctgttcatactgaacacgtgtttgtcattgtgttcgcactttccgcagattttgcaggaataataatattccggccaattgctacaggtgccgtacctgaaaaccttgtctgccgcagctaccttgtcggtgaatacgtggcttgtgcagaacggtttggctgccgtcgcaccggctccctgtgcggagtgcacgtcgccggagtaggttttcagcgagaacagtgtgcggaaactccaggtcggacggctgaacatcgcccttacatcggctacagcagtctccgggataaagagcgtggcacgctgggtatggaagaggtaactgaactcggggcagtagatatcgctgtgttccggtgtataaccctgcattactgcgaatatggcgcgtatgaactttaccgcatcgactttgtcgctgagccagacttccctgatgttgaatgggccttgtatggtattgttgacgtccgatgccacatctccatatatgcgctcgtcatcggtatctacgattaccttggtgacaagcatattcttatgcccgatgaactcatctccgaactcgcgcatggcacggaacgccgcgtgatacgtattattgatggttatcacgtcaagcgggctcacatccgggcaagcagcatcggcctcggcgattgaatacgctttctgcgatgcgcggtatgagtccttgttgagctcatagtccgttgggctactctgtgccagatcacgcatcgagccttttccaccggctccaacaggcatggatacctcaatgtcgatgaagtaaggagcgctgcgctcgaccttggcctgcactccgttgactgtggcgctgatgcggctgccgtcgatgtagtagtcgttgtccttgaatatgtaatcggtgtcgtacttgcccgaaggatctaccatgaacttgatccgggccttgtatatgaacccgtccttgaagaacatgtccccttcatcgtcctcgcggaaatccccgatccagtcaatctcctggacttggatgccgcccgtggcggcaaggtctccgaactcggtcttcgcagatgtgaactgcatctcgcgtgcatcgaaaagcgacatccccggggtcggaacctgtatagtgaaatccactgacttgatcttcggcttgctctgggccgaactatccaaaggcagcagcagtgccgccactgaaagtagaaataatatctttttcatgactctacctgctgccgtctacgaagatgaacccttccgggaagacatattcgttgtttatgtacttgacttccagtaacggacattccgtgaattcttgataggtctccataaggaaattctccttcaggctggagttcagcttgacagtcttgagcgctttgcatccggagaagcagaacccttcgaattccttgacattggagaggtcgagcgaggtgatgccgctgtccgagaatgcgctgttgccgaccttggtcacgctcgccgggatatccacattcttgaggttcttgcagccactgaacatggatgaataaatttcgctcagattctccggaagcatcacttctgtgagattgacgcagccctcgaacatgtcgtaactcatcagtccgacgcggcgtgggaacttgacgtttttcagatttatgcacttctggaaacagccgtggacttcatccatgacgtcgttttcgaagactactttcgtgaggttcttgcagccgtagaaagccgaaccctgaactatcttgaccgaggccgggattactatttcagttataggagtctcgcggaatgccgaattggaaatctccgtcaacgtggacggaagtttcacggacttgatggcggtgccggagaaaatattgccacgcatttccgtcaccggatattttttaccgttgtatgtgacatagtccgggatcacgatgttcttgccggcaacggccgtcttcgccacttccgagatgaatgcgtgggatgcgccgccgttgttggagttgtgcaggacatacaggactccctcgatgtcaaccgtagcacctgccccgacctcctcaatcactttcccggtctggccggacgctgatgtcgtgatgctttttttgttcggctgcggatcccagacggtccagttggctttgtgggcgttctcatagcctccgtgagcattgaaatatgccttggtctcatcactgatccacttgtctttaagtgtgaagagcggagtgagggatgagcggatcagggttttgtactcgcgagagtcaagcacggaggcgattttgttgtggatgccgttgatgacccactggtaagtgtcggcgccgtattcttctttggcttcgttgtattgctcgaccatcttgttcaatgcgcccacgcgagcccaaagttcgcccttgacgatctcatcgtatctccaatgtgccggggtgagggttttgatgtagccgtcggcaaagcagtcgtcgagcatcagaaactcggctacaaggctctggttgtcgagctcatagacattcggctgtttttcactccagttcacctgatcggatgcctctctcggcggcatcaccggctttaccgatttgatcccatacgttgcctcgacagggtatccgagtggcgcaaaaagagcagtgtgggtctccggcaacctgacggtgggagcttcgtcttcagcgttcttattgttgtccggccccaccatggcgtcgtggcgcttttggagttcgctgtcgagacttgaagtgttaccggacttttccggaagttttttgggcgctacttcctgtttgactttctgttctatcttctttgcggcgttcttgagtctttccttgaaagactgcgcagatgcgcatggcgctccggagaggacaaccagactaagaataagaagtgtacgtggaataagaagtgtacgtgcgttcataaaatatttggtatttaaaaatccgttggcggaattagattgataaaaagatttatgtataaaaagttgtgcatattgttgatatttagcaaattaaaacttttcaatagaaaatatagtaacacaatattagcaaaaaatcctaacccatacaagcaaatagtcggcaatttggtcaatgaatcagggaatatgtcaagaagaggagtagttctcagaccttgaaatagagacattgaacatgacatcaaaggctgttggcattgacagtgagtcattgttgtttgcaaagttacaggaatatagtattgaaattcacaatcttatattccgcagacaatacaatgacagacgtaaaattactttgtccctatgtaatacaatccgggaaagaatagccgcagaaatagatggaggcgaagattatttctgcattgattcaaaaccgatagaagtatgtcgttttgctcgttccaagcgttgcagaaggatgatgacggataatgagttataaaggtatggaaacggaaatgacatccaccatgccgcaggaaatatacaaccagcacctgatgcagcgtggaggaaaataagcttgggaggctatggcgaattccgaccttaaaatatccgaccttgacgaacatgccgtcatgggcgcggtacctgggggcatcaaatgcggacgtttgcccgaagcgaccataagggaggatttgccgaccatcctcgaaaaattcaacctgttgcatgaaggaaaacttaacaacgcttctgcggttttgttcggacgtgatttttattattatccccaatgtctgcctcgtctggcgtgtttcaaaggtacgacaatattggtatgaagtagtaatttcgttattggatatcgaggtgatattttttctcgtgcaataattttattatttttatgctagttatttgagattgtgaacgccaacgcaagcagcagcaagtggaatcgttgccttttcgttgcctcgtcctattataaaaaatacaacagcccaatttttcagactattgcctttttttaagggtcctaatagggtgccttgtatcttatattccctgcccctgtgtcggtagcgaccagcgcagccaaggtgtcggagaggtagggcgttgtggcgcggggatgcaaaaatagccctggaaacccgaaaaaacgaagttttttatttgctttctcggattatttactatctttacttcagttatttgaggtggtgaatatcggcgtaatatgcggaaaacagagccgtcgcctgatcgttaccttatcccatcataaaccgtgcaaatttctaaagtccaaccaactgtatggatttagggctaaaccatataagaattgtgtgataggttaaatgtgagcatatactctttccctatgaaatgccacccaatccgtcgcactacggatatgggtgaagattattctcacaatcgggactatattggcaaatattggaatcgcaagtatattcgggctattcaagctgttcttaatagtacaaaaggtaaaataggcaagggaacatcttttttcaggaaagcctttggcgaaaatatcgaagagtaccataaactccttgagatacctgaaaccatgattatttatcgctatttcttcgaatggcttgggcttgaaaatggaggaaagaaaatgactattgaaatcttaggaaatgattcaatatgcaatgcgtcaacacattcatggtggaaagccttttgtgattgcaaaaaatgtatcacccaaagaatgggaaatgacattgaatattattcacagaaacgattttagcaaatcatacttaccggaaacctttacattgatacattataggatattacgtcaattatcgacaagctattatcgaacccaatacggatctatataaactcaaacaagtatacaaccagaatccgctaaaagaattaaagcggaatcagaaaataaaaggaaagtaaaactatgtaatactgtctggtattataaatgcatgacaaaagaaaataaaagaaaaaccgtcttacaacatgctgtaagacggttttagtgaggtctgaagcagacgcaccagccctcgccgtggatcaacgactacgggcagttctccatcatgcccgtacgcggacgcgacaaggtcgatgaagagagccgtcagagctggttctcgcaccagtcggaggaggcacgcccctactattattcggtatacctcgccgaccacgacatcaaggccgagatcgccccgaccgagcgggctgcgatcatgcgtttcacgttccccgaatcggacgagtcgggcgtggtgatcgacgctttcgaccgcggatcgtacatcagggtcatgcacgacaaacggactgtcgcgggatacaccacgcgcaacagcggaggtgtgcccgacaacttcaagaactggtttatcgtgcgcttcgaccggaagatccgggatttccagatctatgacggcacgaagcccgtcgaaggcgaacagttagtcggcgaacacgccctcgtgcgggtaggtttcgaaacccggcgcggagagcaggtaacggtgcgcgcagcctcgtcgttcatatcgcagatgcaggccgtgcagaacctcgaagagctgggaaaggacgatttcgaaaccgtgaaggccaaggcgcaagcacgctgggacgaggtgctcggacgtattgaagtcgagggaggcacgacggaccagtaccgcacgttctattcgtgcctctaccgttcgaccttgttcccgcgcaagttctacgagatcgacaagaacggcaatatcctgcattacagcccctacaacggtgaggtactgccgggatacatgtataccgacacgggattctgggacaccttccgcagtctgtttccgctgctcaatctggtctatccgtcggtcaatgccgaaattcaggccgggctggcaaacgcttaccgcgagagcggatttctgcccgaatgggcttcgcccggacaccgtgggtgcatggtcggaaacaactcggcgtcggtcgtttcggatgccatcctgaaaggtgtcacccccgaggaagacattgcgacgctctacgaggcgatgctcgcaggacgccggaaggtacaccccacggtgagctccacagggcgctgggggtatgagtattacaatacgctgggatatgtcccttatgacgtgaatattcccgaaaatgccgcccgaacgctcgaatacgcctacgacgactggtgcatcgcacaggtggcgaagatgctcggcaaggacgaagatgcgaaacggctggaaaaggcgtcacaaaattacaggaatgtcttcgaccccgaaatgaagttaatgcgtgggcgcaatgccgacgggacgttccagtcgccgttcagcccctacaaatggggcgatgcatacacagagggcaacgcatggcactacacatggtcggtatttcacgatgtcggcggtttgatcgacctgatgggagcccgcaagagctttgcgcagatgttcgactcaatgttcgtggtgccgccgatctacgacgacagctactacggatccgcatccacgaaatcaccgagatgcaggtggccaacatgggcaactacgcccacggaaaccagcctgcacagcacatgatctacctctatgactactgcggacagccccacaaggcccagtggtgggtgcgcgaggtgatggatcgcctctactcggccaagcccgacggttactgcggagacgaggacaacggacagacttcggcatggtacgccttctcggcgctggggttctatcccgtatgtcccgcttcggatgaatacgccgtcggatcgcccctgttcaaacacgcgacgatccacctcgaaaacggaaacgacatcgtgatcgaagccccggaaaactccccggaaaacagatatgtcggcagcatgacctttgacggcgaggagctggaaaaatcctgcctcaaatattcagaactcaaaatgggagcaaagatactttttgacatgcaagctcaaaaataatatttgtcccgaaacccatatactctttgggtaatcggaaggataataaaattaaagaaccgtgacattccggcacacccttttttcggacacaacttttgtgattaggaaaaatagttgattgataacgagttagtaaatgacacaagtacggatttatccgtataaacattatttcgctaaggaaactactcttttcatgtaggtttctatgtaggttaattaataccaattgattcctactaatgcgaattaataataagtcattaactaactcgttatcagtctatgtacacgattaacatcaggggtaagcagaacccgaaagacaccaagatggtcaagctggagataattttcttcaagaccggttacgcccgtgtgccgaaggttataaacatcacagggctattaaaagactgggatgtcaagtctcagagtttccgtgtagggagtgcggaggccactaccaagaacaaactgcttttcgatttgcgaaccaaatatctgcatgtcgccgatacctgggagatggaaggcaggaactggtcgcccgtccagctatcacattgcttcgatgaaatcaaggcggccaaacccgaggtcaaagtaaagagtgtccagcagatgatcgattatcttgaagagacattcaaaaacaagaaacgcatcaagaacggtcagattgtcgacagcacgaccaatgctaaacggtatgtctatctcaagcgtgaactgcaggcgtttacaaaggaaaaatatgaaaaagccttttcctcttatttctttacggatattacagaagagtttcttcttgactttgcgttttggcttaaagaaagaggtatcagaaatggcaacaaggccggacttacacacaaactaaggttgctccgtgccgtatgcaggcaggcagaaaagaaagagatgtacggggtgaatatggataacttcctctgtctcggtgatgatattaattggccggaaaccacttcaagagcagttccggaaacagtcatagctaaaatcgcaaatgttgaccgtaccttgtttacgaaaaaagagcagttgcatcttgatttgttcctgttcagctactataccggaggtatggcgaatgtcgatgtatgtaacctgacatgggatttggtccaggaagaccgcatcgtctatgaacgtatcaagtttcccaaaacagccaaaccggaattactcagtaaagcaaaagccatcatgaataaataccgtgggcaaagttatggaaattatgtatttcctgtttttactcataaacacacgaccacttccaagaagactacacgtgtcaagcaaatttccacacgcctttcacaaaccttgacgaaagcatgcaagatgctgcgcattaaagaaaacatcacatggtattccgcccgtggctctttcatatcgaagatggtagatgccggtaacaatccgtatgtggttgcagagatggctggtaacagcccattgaccatctataagcattactacaagaatacaaagcgggaagaaatcaagcggcagatggaagaaatgttctgaccagacatatccataaagttgtaaacaccttgacaatttctctgatggataaatcatacggtataatggctgttaaaagtcattgattaccaatgtgatatttattatattgacagaatcgctcttattcttgattattttcactacctttgtagtcaataacttaaataatatttatatgaaagagttggtttcaaagatacaggaagtatatgctacattctccacggatgcggcacttcagattgaaaaaggcaacaattaggtaaacactattataatgtaaagaagcggttggaatatattatgttccagccgcttcctaattattttctttacataattatttttatgtaaatattgacataacaacaaagctgcgggactgcgcgcccgtaaggtgtcgctggagcttgagaagaaactcaaggaattccggaaaacgtcgcttgcggcagctgccaaatagctcgttttcatcgcatgacgcagggtgttctttcgaaggacacccttttttgtcccggcggtttcggccttaccggcggaggaaatgacggcagccctgtcgaagattcagccccggagtttcccgtcggtcgtcagggagggattcaaccgctcccgaaggctcgtattgcttttcagcacggacatattgtggacggcataggccaaggctttcgtcgcaccgatcagcacgcagatctttttggcgcgcgtgatacccgtatagatcaggttgcgctggagcatcacgaagtgggtcatcagcaccggcatgacgacgatcggatattccgacccttgggccttgtggatcgtcgtggcgtaggccagcgtcagttcgtcgagctccgtgacatcgtactcgacccatttgccgtcgaaatcgactttcaacgtcctctcctccgtatccacctcccggatataacccagatcgccgttgaacacatccttgtcgtagttgttgcgctgctgcatcacacgatcgccctgacgataggtatagccgccgcgattgaggctcgggcccgaaggattcagtgcctgctgcaacagcaggttcaggttcgcggcgcccacgacacggctgtcattgtcgaaatatcgcacggccagtgccgccatctggcgcgccgtacggtcggggatcaggtattgcgatgcatagacgcccttgcggcgctgcctttcgcacattacgtcatagggccagttatcgacgccgtagaggaatggcaggtcattgtgctgctgccaataatcgagaatctccggcagcgtatccggccagtagaaattgcgccgcagatagtaattctgaagcgcatagcgttttgtgattctttcaaagattttcattggatcaggttttagggttactcttctgccgctgcgccgcaatccagtcgggattcagcgtcatacgccaatcgggatcgccattgcggtaagcgagaagttgggcagcgtaatcgtgagcctcacgggaattttgggcccgataatgaaacatccatttctgaccgcatcggggacattcccagacgaccatcgtaccggcagaggtctcggcaaggcccagcatacagggcactacgttatagtgcggcggttcgaaaccacattcataacaggtataaataccgcggttatagcgtccctgcggcggaacgcgcagggacaaaggaatatcgatcataataagttatggtttaagtgttcgtatcttcaggcgaagccgcgactccatcctcttggcaatagtcgaagcgcatcagctttgatacacgggcatactcctcgtcgtaatatttgtcgtattccttttgaaactcctccttgtaatgggttccgctgtcgggatcgtcagggtcatcggcttcgacaaatgtttcgaaaggtgcatcgtgcgcattcagcagttgtccgacggccagatcgcaggcaatttccataatcgacgagttgatcgcgtccttatggttacggtaatattcgtttaaattcatgttttagttgattataatgttcttggtttgagttattccggtcgatatcggaaggttgtccgtgatacaagttccgtctgcggccgagtaaatcataaccgtaggatctccgttattgttttctatgtccagtggatattccgttccgggaatttgataagcaacatcttcctgataggtcggatcgtttgacagttcgtcgagttgaccgtctgcacacagctccttgatcttctggactgccgtttcgagattctcggcttcaaaactgaaataccggcaatctatgacagtaattttttgattccgataaaattcatagcgtttcattgcgcgattatttgaggttaatacttcgacacttccagtccttttttcgtcatgctcatcgagaagcccgcctcatggagctgtttcagtaccgaagcgttgctctcatggataagaagcggatagacttgggagtagttgtcggcgatcggtgtgttgaacgacaccgtgatccggttgttccgggtgatgatttccagcgcacgccggaaatcggattcctgcatcttcatttgaatgtgtctttaacgttttttgaatacgggacgtagttcgcacggaaaaacttcggcttccgaagccgaagaacaaatccggatgatgtcatcgtcagagggttcctccacgtcgtcattacccgaacatacggtataatatcccgacgtttcatcggcaggatcacgccagaagacccgttgcccggggtgaaagacctgcacgcgcggcagcttctccccgtcaagggtctccggaagagcgattacttcccggattgcaagccggggatgtttgtcgaaatgccagtctacctcggattcttcgccgagagtcgtttgaatcgcactcagaaccgttccgcattgttcggaaacaagacgtgcggcctccttgccggaagccgcacgcagggtaaaacagccgttgaaggtatagctgaccttcagtttgaattttcgtcgcatagtgtttaagagttatcgttgttgttttcagaccattcgtcgactgtcgtcgcgtcatagatgccgtaccggcgtatttcagcgtacgcctgtccttcccggagcaggggctgccgggagacgaacgttccggtgaagtttgccaaagccagcggaacgagccactggaaatcgctgccccgaccgcccatgacctcgcacgaatgaaaatcggcgggaagggtttcggaatcgaggcgacacatagtgaaaagagcagagatgccgttgatctcggcctcgcggaaatccctgatatccgcgaaaggaatggatgattcgtatgccatgatatggaaatgacgccgcccgctcgttgcggagcaggcggcaggttattaaagaaagattcggtaccacgccccgagcagatagacattaccttccacatagagcgagtataagtccgtagagacaatccgcaggaacagagtcctgtcgccgcgcagtttcccgatctggcgccggagcgcttcggcgggaaagggtttgcgcgagatgaaccgtccgcggatctctgcctccgaggggaggtattcgtacaagcggtaattgagcgccagccagcgaaggattttacggcgggttttcgcatcgtccgtccgcagtgtgaaacggttgaaacaaagattgttcatcgtaaatcggagttagttcagtgacaaggcctgacagaaatagtccgtataatcgaagtccagtcccagcccagaacaggccgtttcaagatcgccgtagcacagagccccggcatcccgcagttcccgcaggttgcgaagttccgcggccaaatattcctcggcgcgacgttcgccgcagcggcacgcagtgcagatattttcgataataatgtttcgttccatagtcgtttaaggtttaggtgtgaatttattgtcggagagtgcaaggaaatcgtcgagcgtgcggcaccgatagtccaaagagatcttttcgctgtaatccgtctgccggatatcgaaagtataggtcaggccgttacgaatgatctggccgtgacttttgtcatgaacccaaaccacatcggacagagcctccaaccggttgcggtacccgattattttgcgttcgttctccgcatcgatccgttcgagattccggaaaccctgcgtgaggtattccacccagtcgtcgatcttctttttggtgaagaccccgatacggttcggagcggtttgtttgtcgaaagccttgccgtaggagtagttgtccgcatatcggaagaacgaccaatcgaatcggaggtcgtaatagggttttggatagaaatattggcggacgagaaacaggatgtcgtttcttcggaaaccggtgcaagcttcctcgaaatagtttttcaggctgtccacggcatgtgtaacacggtagaacaaggctgcctccggaacgaactcctgcactgtttccaatacggccgatgcgcttcgaatagcccgctctatgttatcctcggcattggcgagcagcagctcgtcgaaggtcgactgatcgatccactttctcatcgctgagcaacctgcctgcggcaggattccgtttcccgcaggtaatcgttcaacgcaggcacaaggatcgtacactcggcatcgggctttccgagaaaacatttcacctttaccgatgcctccacgccgtcccgggcgtaggtcttgaagcggtagtcgtaacccgccaccgcaatctcgaatttttgatgtttcatcttcgaaatggattttgatttgacatacggccggcagatccccgctatgaaagtgagaagccggcttcggggcgggattatcagcgacggcacggacaaggcaaatttttgaggggcgatacgacccgaagggtggagatcgtgccgcaaaaatttgacgccggaacgtgtccggcgctatcttgccccgaggccggcgttcacaaagggatttttaattattattcgtgctgtctcaaaacaaaaagagactgctgcggatgcagtcagtccctttcagcacgaacggatcagcgcacctcgaactgcggtatccgggagagggtcttccgcagcttccggcggtagaaaagttcagtaagcgcaagcaactcgtaggcatcgtacagcatctgtccgttgacggtacgggcgcggatcatccgctttttgcggcattgttcgagctggtgacggtccagacccagcacctcgcagaccttgcgggccgagaggaacatcgggcggtcgctgtggctcaacaggtgttcgaaaagcagtgtggattgtgtcagcatgaaatgcgtgcggagcagtttctccaaagctccggactccaccaaataatacttgtcaggcatagggttatgaattaaaggttcctgatccggtttttaagttcttttcgctgccggcactccgtgtcgatccgctcgacaaaacggtttatctcggcagcggagaacataagacggcgcccgaagtggaacccggtgagctgaccgctgacgcagtaacggcgcaactgacggtcgctgatcttcagcaggtcgcagacctcgctcacttcaaggatcggcgtaccgcaaagcatattccggtgacgtttcatataggcgatatcttcgcggatctctcggacgatttccaaaatctcatcgagtcgttccataatcgggttgcagtaggttttcgccgcaaagatgcaatgaccgaatgatgagtttatacaagtatgtaaatacataatatatttatatactttatcgcaaagtgtctacacggagaatttcgttgccagtttctcccggagcatggtaacctcacggtcgatcatcggcggggtgactttcgcatagatttgagtggtggtgatatttttatgtcccagcatcttcgaaagcgtctccagactcacgccgttcgacaggcagatcgtcgtggcgtacgtgtgccgggcaaggtggaacgagagttgtttgtcgatgccgcactcccgggcgatgtttttcaggctgtcgtcgatcgaatcgagtgtagacatggcaaaaacacgtccgtcgccggtcagaccccggtacttgttcaggatgaacaacgcatacggcagaagtttgacaacgtatctggtttcggtcttctggcggttcccgctgatccaccactcgccctgcgcatcctgctcgatccggtcataggtcagcgaggccatatccgcatagcagatgcccgtgaagcaggagaacaggaacatatcgcggttatagtcctgacgcttataccgcagctcggtagtcatcatacgccggagttcatcttccgttaaaaaactacgttccggattcggagccgtatattgatagagggaaaaggggttgcgaggcatccagccgttgttgaacgcgattttgacaacgtatttcaggcatttgagataaccgctgacggtcgtaggcttgagccccagatcggatttaaggtagacgtggtattgctcgatgaacgactgttccaactccgccaacggcatatcgctcacgttatactccttacgcatgaaagtccgcagatggtcgatggatttatagtagcggttccatgtaccgtggcagcggtcgatgccgacacgtttcttgaggtcgccggtgaatttctcgaacgcttcgagaagcagccggtatttctctccgaagccgagataggcattcttgaccttttcggccgtaacgtatgactcccggtcgcagatatcctgatagtgcttgccgatctgggtgcggatgttgtccagatgacggttgatgcgatccgcttcgagactacggcctttggcgcggccgccgctgacctcccaaagcgtttccgggacggagagcttcgcgctgaactgcgcgatgctgccgttgaccgtgatgcgacccatgacagggacgactttctgatctttgtctttgttccttttaaggtagaacagaaccttgaacgtgctacgcataaactctgctttttagggttgcaaaaataatttcagcagagtcgtatgtcaagatgaataacgaggcaagaaactgaaaatcacgtttctatgaataatagagcgaaagaaacgaggtaacgatttggaaaccaaaacctcgtttaacattaccttattctactttttttctaaaacaaaggtactgaagaaaagtgtataattatttgattatcttttgctttacacttttttatacctctgttttttatccccggaaattctaaagggaagccggtgctattttaatgccggttctaatacaaccccgtaagcggacccaactgcacgatccaatctttctttccccacaggtaatccgtcatcctgaaccgaggaatatcgggataaggaggataataatcaagggattcaacctcaccgaatacgttcgatgtttcatcccatctctcacaaaaatcctgcaagagaattgcctcttcataattatacacgtcgagctttgcccaccagttattcaggtacagggtatcgctcggtgctatttcgttatccatcttgccatcgacaccggcacttaaaaaaatgaaggataccggaacctttttataataatcataaagaggaatatacaaaaactcacctccgtccctggcaaacggatccgtcagaaattgctaggctcttaaatcttttttcgccatattaggccaataagtttgctgataaaaatcgacggcttcatccatcgaacggggataatacccgaatgaattataatactctaatggcagtcgttgataagtcggccacataaagtaatccctaatactttctgccgtctcgacatacttgccactcaaataacgccacaacaccaaactgctcaaagaaaggataactaccaatgacaaaattgtcaagatcaatctttttcgtttcatttcgaaagaaaatcaaatccggttgaaatacaaaaatcgtaatttcaaattttttcgcagttctttatttcgatacggattcgttcacctcactccgtacagattatcatccatcttcgcttttacctttcgacctacaatcgttaccacttcgaaaccctccatgtactttctcatcatacaatgcaaccattcgggcatcggagaagtatccgattttatcttcaggaaattctttttttaatcgacgagcaatacggattccttcctcgtccagttcgaccactttatcccgatcggggaatccctttatgaactccttccaatattgctccagccacacatcgatccgtttcgaaagatccggacttatgccgacttcatcatgctccaagtaacctccattggccgcatcccgaatgcccgttccatcgaagtatccatccaccgttaaataccgcataacaaacaaataaaataattggcaaccgcaagacttcccatcaggaaacgcgctacgattcggattaaacaaaaatagtgaaaaccgagaaaaaacggaaacttgttcccagttttccgaatcgcatcctatttaagactatgtcaaagatagtgagcagtgagaaatcgtacgggcttgcacgcagagattgccgaatcgtatcctacctctccaagatagcgaaagccgaaaagaaaacgggagcttgctcacagttttccaggcgcattctaccttctacaaagctaggaaataaattgaaaaactcgcctggtgccatcggctaaagatcaattacccaagtcggcttcggaaatcatattattcagcagagcatagaccgtaagaccggcaatggtcttgatgcccgtcttgcgggtgatgttcttgcggtgggaaataaccgtatggatcgatatgaaatactggtcggcgatctcccggttagtcaggccccgggcgacggcaacgaggatctcgcgctcgcgctccgaaagctcatagccttcaggctgtgccgtcgtacgcgtctgctcgagagcctgccgaagtttgtgatgcacccgtcccggtgagtcgtaaagattgattactccgtcgaactcgtgcagcagctcatcgtccacagctccgtgacagagagcgataatcggaacgtcctgcaacatcggaaaggcgtttcgtatcggagtgcggcgcatcacgggaaacagcgcgggattgatcagcaccaggtcgggtcccgtcgtcgccacccgttcgaaacaggtcgccgggtcgccggtagtctcggcatcgagggccctgaattcggaaaaaccgtccagcaatgtccgaataccagcccccacgattgcggaaggctcgataatcaacactttataaatacgaccgttatccatttttctccaatttttcgaccaacggaatcaagatctgattctcgatgacggtatgtcggctgaggtcctcctcgaagcggaaaatatcggagagcacttcgtagcgcagcttggcggaacaattttcaggaaggtacttgataatgatattcttcagatcgcacagcttcccgtcgatatcgctatgattatcttcgaaacagaggatattgtaaccgtccacccgacgtttttcgagcagagcctgcacgtaaggaaacacggttcgctcctcgtaatcgaaatgattatccacttcccggcggtaatcggcgaaaaacgtactcaagattttactgtgtactccgtcgcaagtcgctgtcatcgcggccatcttcgcatccagatgcggaagagtaacctccagataatacagatgcgaagtatgcaggtaatcgaggacaccgcccaaatcgtccgaagtcagttgctcataaggcagaaccgggacctccgacgaataaattcggcaaatcatcagaaaaagctccgccgaaattccgcgttggcgacagacttcgccgacactcgactcgccgaagccgaggggaatacccatgcgggcaagcaccacgagcaactcgtagttggactcgaccaggtcggccagcttcatacccggcgaaaagaggagacgcccccgctccgtattatcgaaagaatgttccgtctgtttcataatgcaaggattatgttacaaagatagtgaaagccgagagaaaacgggaacttgttccctgttttccgaggcgcatcctatcttctgcaaagatatgcaaattcggacacaccgccgaatccccatatattggtatatcgattaccgcagcccctatttattataagtacgatatcggaatcggggcatccgcgattttcaacctgttgtgttcgaaccacttcataaaatcattgaatttctgccggttgtcgttgacccacaagccgaatgcagtcttattcccttcccggagcacccaatagttgtaggcttccagatgaccggcatcccgcaccgaacgcagatattccaaaaaaggaacgacgatttgattgtcatacttcagcaccgtattcgccccttcgtccaacttcttcaggccttcgtcgatccaccggctccggatccggttcagggattccagatcgacggaccgttcgcccccggccgcagcctgcatcgccgcctcgtacacggcaccgtaaggctcccgcacatccccggccagaagcatatcgatcgttatggcgatcggacggttctcgtaaaaatcgaccgacacggaatcggtggaaaaaacgatgccggttttatagttacggaacaaaagctcgctcatctccttattccggtcgccgctgggtagcaggttcatcattatctcgccataaatctggctccagaccttgctggtggaataagcataaaactgggccgcccggtaatagttcgacgggaacatcggagctacgctgatgcctttttcgaaagaagcgaccgcttcgtcgtaatgcccctgcattcccgaaacgaccccctgctccagataaagagcgcccgaatcgggaaagcgtttgagcccctgcgcataaactttcaaggcttttttcggattcttcagataatcgtagcaatttccgaccaactgataaaccagatcgttgcaatcctcgtacttataaagtgttttggcgagtttgatcgctttctgataatcccgtttgaccatataggcgtaagccatctcgtacgtcaaaggccaatagtccggatcgagtgtcagtgcctgccggagcaacacgataccctgatcgggatcaccgttatccatcaattcaatagcctgccgctgcaatgcgagcacctgctcgcggttgttctgtccgaatgacagttgtgtgccgaacagacaaaacaacgcccatagcaatattccaaaaagtcttttcatgacaacaaaaagttaattttcgatgaatgaagttacgattattttttggaaaaacaccccttcgacaaacaaaattaccctttcgcaccgaattaccggcacgaaagagtatatttacacgatacgaaacggaggttatttccccttacgggcgatcacggcatcgatgcaggcccggattttcggtgcagggtcctcccacgtatcgggcttgatgaccttgccgtccttgggattgtagtgcggcttgccgtcgggccacaacttggccatgttagcctgctgaacgatttcgaacagttcgtccggctcgagtcccatctcgaccatcgtacccagcgcgaagtacatcaggtcgatcatcgcgtcggcctgctcgtagatatcctcggcgaccagaaattcagcaacctcctcgttcatccatttcgcccggctgagcgagcgttttttatccagcatacggggtgcatccggacacggatgaccgaacttttcgtgaaattcacgcacgtcgttccactctttcttcataacactcaaaattctaaaacagccataaaggtacgaattaattttcacaagacacgtcccggcaggagtttcgaacctctttttccgggtgccttttggcaaaagagcggaatgcccgcattttcgatcgtacaaacatcgaccgaaaaccacgaacacctttttttgtatctttttacaaaacgagaatatgatccgaacagcctcggacaaccgacggtcaaaaggacgaaacagaagatatctgtgaactctgctctcaagaaaaagtcggcttcggcaacgacgtttggtttaccgtccgcacttcacttttctggaaaaataggatacggttcggcatagctcaaacgacgctcggagggggagggcagctacgcttacgtataatgccctgcaaggaggcgcaaaagggacttgaacaaatttggttctgtccttgtcttttactatctttgacatagccttggataggaggcacctcggaaaaccgggaacaagttcccgttttctctcaacttttcctatctttgcaaaaaatcggatgcgtggcccggacaagttcagacagatttggcttaccgttcgccttccactatttttgcagaaagataaattggccggacagacgattgctgccgccgcctgcgaaacgatcggatcgaacccgggaacaccctcgccgtacctcttttgctaccgcttgtcatgcagatcaacaaggcacaattcgtatgcagctccgagcgtctttcgcaactgccgaaagactcgctcccggagttcgccttcatcggccgcagcaacgtcggcaagtcgtcgctggtcaatatgctcacaggtcgcagcggcctggccaaagtttccggcaccccgggcaagacgcggcttatcaaccatttccgcatcaacgacagttggtatctggtcgatctgcccggttacggttacgcccgcacatcgaaaacccaacgcgacgagttcgccaaaatcatcaccgactacgtactccgatgcgaacggatgcacttcctgttcgtgctggtcgattcccgactggagccccagaagatcgacctgcgctttatcgaaatgctcggccgggagggcatccctttcggcatcgtctttaccaaaaccgacaaactgtcggccgcacagctcgcacgcagcgtcgaacgctacaaacaagtgctcggtgaacagtgggaggggttgcctccgatgttccgctcctcgagcgaaaaacggacgggccgcgaagagatcctggacttcatcggcaaatgtttaacagaatgttaaaaaaagattttagaaatacccgataattcggtctttacatcctatctttgcaccattcaaaaacacaatcacatactatggctatccacaaaatcaaattcttcgcaggcaggggctcgcggtacctcgcggagaaaatcgtcgcaagctacggcaccacgctcggaaactcggaggtgcaacagttcagcgacggagagttccagccctgcttcaacgagtcgatccgcggctgcaccgtgttcatcatccaatcgaccttcccgccgctggacaacctgatggaactccttatgatgatcgatgccgcacgccgcgcatcggcctacaaggtgatcgccgtgatgccctacttcggctgggcgcgtcaggaccgcaaagaccgtccccgcgtaccgatcggcgcgaaactggtagccaacatgctcgtcgcggcaggcgtggaccgcattatgaccatggacctgcatgcggaccagatccagggcttcttcgacgtaccggtggatgcactctatgccagcggcatcttcgtaccgtacatcaaaagcctgaacatcgaggacctctcgatcgcggcacccgacatgggcggcgccaaacgggccaacacctatgccaagcacctgagcgccccgatcatcatctcgcacaaggagcgtgcgaaagccaatgtcgtgggtaaaatgacggccatcggcgacgtgaagggtcgcaacgtaatcatcgtggacgatatgatcgatacggccggcacgatctgcatggcagccgatatgctaatggaaaaaggtgccaagagcgtccgggcagccatcacccacccgatcctttcggggcaggcttacgaaaaaatcaatgccagtgccttgcaggaggtgatcgtcacggacaccataccgctcaacccggaaaaggacctgagcaaattcaaggtgatgaccgtagcggacatcttcgccaacgtcatcgagcgcgtacacaactacaaggagatttcgtcgattttcttcaagtaggaggagtttacaatacgacaaaggggatgctttttcgagcatcccctttgtcgtatttaatgtttcgctatccggtgcatctcacaaaagcaacaacagtccgaccgccaacgccgcaaaaatacagaaacaaaagcgtataatgcgattattgcagaaagacaccttccacaagaaataaaacccagcgcaacataaaagatataaccccagtaaaaccaaagaaacaatcccgcaatacaccacgtaaaccagcccgtttccgcctgccccatcgcatatcataccaacaaaaaatacgattatgtcgagcagtagcaacccggtcagtacaagggttgttatttctgcaattctgtttttttcattttgctccgtcatttcagcggcgaatccggttcccgggccataaccatatagaacatacggtcgaggaagccaggggcgaatttcttgataaagtgtgtagcacgcccctcagcctccatcaggcaaaggcgtttgcgcttttcgattccccgaataacgatacgggcgacctgttcgggcgtcatcatcttcgcctcgtcgcgcggtgtctcgccctggctcgaaccgtcggccgtgagcgccgaaaagcggacattcgaagccgtgaaccccgggcaggcgaccatcacgtgcaaccccttcttcaggttttcgatccgcacggtttccagaaatcccgtcatcgcatatttcgaagccgaatagcccgtacgccccggcaggccgtgcaaaccggccaccgacgagatgccgaccagcgacccgtgcgaagcctgcaagtacggcaacgcgtatttggtacaatagaccgtgccccagaaattaacgtccatcagacggtgcagcacctccagatccacgtcatcgaacagtgcccgcatcgaaaggcccgcattgcagatgagcacatccaacccgccgtactccccgacggccgtgtcgatcagattgcggcactcctccggcttggtcacatccaccgcgcagtaggtcgcttcgccgcctttggatcggatatctccgacgatgagctgcaatttttgcaggctccgggcgccgagcaccacgttggcaccctgcaccgcacattcgcgggccaatgcctcgccgatccccgacgaagctccggtgaccacgacggtctttcctttcaaacctttcatcctatcaatcgtttacatttatttccaatccgtcgtaagccaaatataccccttcgggcaacaacgcggaacgctcggcgtaaagacccatttcatgcgacatatgcgtcagatacgcccggcggggcgccacacggcggatcagcgccaatgcttcgtccagtgaaaaatgcgaatcatggggctggggccggagcgcattgaccaccagcacttcgacaccgtacagcttccgctcttcggccggggcgatggtcttgaaatccgtaaggtaggccagttcgccgaaccggaaccctgtcacctcgaatcggggcgaatggtgtcccgacacgggaatcacctccttgtccttaacgcaaaagggaacggcaggatctatttcgcacagctcgatttcgggcaccccccgatacttgtccacactgaaggcatagtcgaagtccttgcggacgcatttgagcgtctgccgtgttccgaatacgtcgatccgatggatcgtgggataatcgacgaaattgaaggcccgcacgtcgtccaatcctccgatatggtctttgtgttcgtgcgtcagcagaatcgcgtcgatatgccggaccccggtccggagcatctggtaacggaaatcgggcccagcgtcgatcaccagccgtatgtcgtcccactcgagcatggccgaagtccgcagacggttatcgcggggatctttcgaggtgcagacggcacaccggcagccgatcaccggcactccctgagaagttcccgagccaagaatcgtaagtttcatacccatcgcaaaaaacgtcggagtttctgtttttcccggcgacgggaacaaaaatacaaaaaaaacaccgcagaaaagagaaatcgccgctttttctcgcacgctccagataacgggaagcaacgcgttttaccgtacgctcggataggctggagcgactgtcggtatcattcgaaacgggcggcgaaaacgatccacgataccccggggaactccggcggtgcacacccgaacaattcggtatctgtcggaaaaattctaaaaccataccgccacaatcctatacctctcctcctacagatccgataatctcccggaaccggccgccctctcgcccctcccgaaaacgctaccgcaagacaaccggaacacgccccgcgaaacagtttcctccaccgcaaacagaaggcgggccggcaactgctgacgatcgccgccgttcccggcgcacatacgacattcatcacattccgctcggaggcgtccagaaaatccgatgtacgttttgcgattcgatttatacaatttgagaacgaaacatccttcaatccggataattttgtataattatttttcagattcgggtcaaaccggaaaaaccattcccggacacccggattttttaccccgaaaaacaaggaatttcaagccccgtgtatcccacccgactctaccgtccataaatttcaccgacctccatccatcgaaaaaatgcaggacggaagagtcgcacggggcgatttcccggcgaaagccgaaataatagcgcaaaaagacatttttagtacttatttttactatcttagtattcagaatgttggaaaacctcacatatttccttaacggagcttccctgtcatttttcgctatgggcgccttccatatggcgatttatgcccgacagagcaaatcccggccccattatctcttcacgatctgcctgatatggatggcattgatcgaactcaaagagtttttcctgagccacgatgccgcctacaactacgaaattctcggcccgggcttcacctttccggacctgtttaccctggctctgctgtcgctcttctttttcgaactggtgatgcccggccgcatcacggcacgatacagcctcaaactgctgagccccttcgttctgctcggcggcgcctactggctcggaacggctttcgaaccccgcacggtatatgcttccctgccggagttgctaaaggacctgccgtccttcctgccgacggtacttctgctctacaccctatacaccgtcggttactgcctcctcgccctgactcgcatcgtcctctactccatccgttactcccgggagatcgcccaggcctactcgttcacagagcgcatccacctgcaatggctgcggtggatgtcggcactgctggccttctacctgctttcatacatcatcatcattctatttttcagcaatatctggttcaccattctcatctatatcctgacacttaccgtctggggtatcctctacggctgcatcctgcaataccgcatcccggacattatccgggattattggcaaccgctcccggaaggagaacccatcgaagaaaatccggaaataaacctcgccgaaggaaaaggacgcgccgcatcgctgcgggaacagttgcaggaagccatcgtacagcgcaaactatacctcaaccccggacttacgatcatcgacttggcctgcgaatgcggcactaaccgcacgcaactctccctgctgctcaacaaggaattgggcttgtcgttccgcgactacatcaaccactgccgcattcaatatgccgccttgccgctgctcgaagacgaggaggccggccataaaatcgaagaagtggccctattatccggattcgggagcacggcgactttctaccgcgccttcgccaaagaaaaaggcatggccccgcaacaatggcaggagtccattagaaaatcccggacaagggggggggaagacaacggtttacgggaaataaccggacttcaggaagagtatccgtaaggcatcgttcgcaacattgaacaagcgtaccgaagtcgcaaatcaatttgccgctccgattcatttacaatggacggctcaaggatacggtcctatttccttttaggacaaaagcctgctctctgctctctgctctctgctctctgctctccgctctccgagcgtcgaacccgtaatccggaaacacccgtcagggatgccatccgatcttcttcaacgatagccggcatcgaagagccagccccggataaagttcatcgccgaataaaccgccccatgagccggatcctgcgccgcacgccccgaatgcccgaacacccgtcaagaagccgccggccagttatctcttacggtcgccagaagtaaaaagccccggacaaggtcgcaattcctatgtgccggggtaacgaatccgcaatccggaaagcacccggcccccggacaaaagcctacgctccatacaccccggcagtaaattctgcggccggcacgggctcggacgcaaaagaagagcaccgcttcgatcccgccggaaacggacacgcctcgccgtaaaacatcggcagtcatataccgccaatataccttattcgacggtcgtttattcacgacccgtgaccgtgttgtaatacttgtcgccctaaatcccttcgctcggaggaaacttgggctacgacacaccccaaagggacaccgaagtatataatcacaaaaatacggtacttcccggcagccaaatgaaagcggcgccccccttttcggaagcgccgccgtatcaatcgaaatacaggtcttattcggtaacccgctcgagccatttcaccataccgagcataacgcccatcgagatgatgcagaccgagaagaatacagtccaagccacccaaataggataagcattgtagatgagcggaccaatccagagcagcagattgcctacggccgttgcacagagccacagaccttggcaaaggccctggagatgcttgggagcaactttagaaacgaacgacagaccgagaggagaaatgaacagctctgccacagtcaggaagaagtagagtacgaagagcacccacggtcctgtcttgagagcggccgcctctgcagccgggagatccttgaacgcctcggccgaaggataaccgttgatgatcgagaatacagtcatgaaaaggaatgccaatccggccaaacccataccgatagcgatcttgcgaggtgtggaaatcgcttttccacggcgtgcaagagcggcaaatacccacatcacaacaggagtgaggataatgacatagaacgggttgagagcctgccatatttccggctgtacggagtcggtctttacgaaatcgcgggcaaagagcgagagtgaagttccgttctgatggaatgaaaaccaaaagaagatagcaataccgagcacagcgaagagggctgccatacgctgcttgatttccgtagccattgcagctttttcctctgcagaatatgtaacggtttcctcttttgctttctttgcgggagaaggaagctgtcttttggtgaaaaggaatatcgagagagaaataagcatcgcagcgacagaggcgatgaacgaatagtggatgccggtgttgaagacattaagatagttcgaacagaatgccgatacggagccggcatcacctgcgaccacagagccacccacctttgtaatgagctcgtaaagattggtaaggtttacttccgcacccgccaaaaatccgtggcaaagagccggaagctcggcattatacatcaagccgttctcactgagccaccagctgcggagcaagggagctacgaagggagccacaacgccaccaagattgataaagacatagaaaatctggaaaccggcatcacgctgcgaagcatagcgaggattgtcgtacaactgtccgacaatggcctgaaggttgcctttgaaaaggccgttgccgaatgcgatgaggaacagcgcaccgcaagtaagcgtaagaagccatgtctgattctcgggagttgcgaaaatggggaacgccaatacgacataaccgatagtcatgacaataagaccggaaatgatggttcctttgtagttctgcgttctgtcggcaatgataccgcctacgaggctaagcacatagataccggcgtagaagaaagaatagactaaagcactggtctcttcagacagaccgaatttggaacatagaaacagcacaagcaccgcgttcatgatataatatccgaaacgctcgcccatgttgctcaatgctgccgggatcaatcctttgggttgatttttaaacatacgcgattgaattagaattttttctgttttttgtttcgcccacaaagatagaattatttttcgtatttttgcaaaatgaagttacgaaaagagtgtaatttattggaaatgagcgtaggttaattgctcttgatagtaataggttacgatttagttagttatctactgcattatccttctgcgcgttgcgtaaccttcaaagaactcttcgtatgcaaaagtagctatttaattcgagattttgatataaactcccgttttttatcccctcattcataagaattttccgtaaaagcggtattgtccgtcggcacaccattgcccaaaacgagtttggaacaaacgtgtgccgactaccgcatagctggagaaaagggcattgcctcacgcctaaacgatgtttagacagatgaagcaatgcccctttcttttgcgcctatgccaagaggtgcttttacgggttttcaaatgatttttcttttttcgctgtctcttttgccggaagcggaaagtgaatgcagagtgtgtcagcctgccccatgaatgaaacaggcgcccacacacagccggacaaaccgggaagaatgattgttgccacccggctgaacaagttccgtcggatcggaaacaatcatacttcctttgttgtggtttgcccttttcacgcttccggtgatgtctttttccttttggtgattcttttttttacggattttcccctgaagtttttttctacacaatctgcctctgttttcgtttacctccattttgcgcctttcagtaagccgcatcagtcagtcattttcgttctgggcgcaaaggtaattccgggattggacgggaaagcaaggtcaagcctcctgttttcggtaaaaatctccagccctgcgggtagtattttgaccgaaaaaccttgcattccctaatccctaccttttcaagcacccgaaacgaaaacgaccgatgcgacagaaagacgcataaaaaaaatgtcggataaacgagaggcagataagatagtttgaaactcaactccctcagctcttgaatccgcattaaaaacaaaaaaatcaaaaacagcgaagatatgacggcaacggcaaatttcagacaaatggcgcaacacatcgggttggcgatatgcggcttgatgatgcgcaccgccttcggggtgttcggcatcctttggggcatcatcagagagattgtaaacggagtgttccgagtggcgataggtgtaatcgtggctatcctttccaccattgccttctttggcttcatcctttggttattcaccctttaacccttaccgacatggcaaaaagaaacagcaagacggcagcgcagcagtgcagatattacgaggtggacaacatcttcgtgtatatggtggaaacgtacatcaacggcaattttgaaactttccgaagattgtaccacgaactgaacaaggacgcacggagggatttcatggacttccttctcagcgaggtagagccgacctattggagagagatactgaaacagataatctaaaaatgacagcgatatgaaaggaacagaccatttcaagagaacgatatatatgtacttggaacagcgtgcggaggaagatgcgctatttgcaaagaagtaccgcaaccctgccaagaacatggacgagtgcgtgacccacattctgaactatgtgcagaaaagcggttgcaacggtttcacggacggagagatattcgggcaagccatccactactatgaggaaaacgagatagaggtgggcaaaccgatggactgccaagtggttgtgaaccacgttgtgaaactcacggcagaggaaaaggcggaggcacgtcagaacgctgtccgcaaataccaagaggaggaactccgcaagttgcagaaccgccacagaccgtcagcgagaaaagaaaaccaaccccaaccctcattatttgatttaggcttatgaaaccgaagaccaagatacagaaagaggtggcaagactttccgccaaccttcgccccatatcagcgacacaaatagattgggcataccgccactgcgttgagcatatcggctaccgcaccaagaaagggaacatcacctgttccgactgcggtcacgagtggcacagcgacagcggactatgcgacacccttgaaggctgcacctgccccaaatgccatgccgaactcaaagtgcaggacacacgcagacgcatctacaaggaaacgcagaatttcagcgtgataaccacctgcaaagggtatcaggtaatccgcgtggcgcaggtcagatgcgagagcaggaaaggcgaaccgatgcgtttctactgccacgaggtcgtgcagcgttggatttcacccgacggcaaggttacggacatggcgttgctccgtggcttccttttctgctattgcgatgtgtgggcattaggcagcgatatggaggtaagaccgcacaacagcctatacgatgatgtggtggcaagaagctgtgcatatccaaagatgaggatattgccccaactcagacgtaacggcttcaagggcgatttccacggcatctcccccgtgcgtcttttcaaagccttgctttcagacccaagaattgaaacccttatgaaaggcggtgagattgaggtcatgaaacactttcttttcaatacccgtactgccgatgaatgttgggcatcatatctgattgccaagcgtcacaagtatcagatagacaacctctcaatgtggtgcgactatctgcgtatgctcaaaaaactcggtcaagacctccgtaacccgaagaacatctgtcccgaagatttcatggcggcacacgacaacgcaacccgaaaaattgaagccatacacgagaaggaaagagccgcagagcaacgccgttgggagattgaaaggcgtgagcgtgagcaacagcgacaactccaacgaaagaaagatgcggaggatttcatcgccaacaaatccaaattcttcggcttggtaatcacggacgaggaaataatcgtcaaggtgcttgaaagcatagacgagtattacaacgagggcaagacgcagggcatctgcgtgtttggcagtggatactacaagaaagccgacaccctcatactatcggcaaggattggcgatgagattattgaaaccgtagaggtggacttgcgaaccctcgaagtggtgcagtgccacggcaagcacaaccaggacaccgaatatcacgagcgcatcatagaccttgtgaacaagaacgccaaccttatccgtgagcggatgaaagcggcatagcataacccctaaaacaacattgatatggaagtaagaattgaaagtatgatttgtgtgtgggatgatgcaatccccacgatgttccttgaatttgtgaacctcctcactctcacaacgagtgagggggaattgagaaagagcgtaaaggagtttgccgagaagcacgaacttgacaagtttttcctttacggcttcggctcacaccatttctacctgcaccaacgctacacaagcaaccccgaaatggtgatgaagaacagagttctgtcagtacatttttaaccatctaaaaagcaacattatgacaacacgaatgaccatcaacggagtaagcacctgcgcggaagcaggtacggagaaatacgagcgtttccaatcgggtatcggaagacgcaggcggacacttgtgcagtacgactaccgccaccccatagacagagaattgttctcttgtgtcaaacccacgttggacgagtgccgagccgcacgggacaagtggctgaacgcaaagaagggaaaggaggacagactatgaacacgacctatcaaacgctgatagtcaagttcagcgaacctatcacggcattggacggtatctttgacgataccggagcgtggggaacggacaccctcaaggggtggatagatgattacgaaagcacacgtttcaccgccaccgacagccatacggcagtcatcacgagcgagtacaatatggaatgtgtgaaagagtggctacaacggcagacccccatttccgaaatgcgagaattttgaacgggatggcggtgtccgcaccgccaatacttaaaaccctaaaaacaaaagatatgatagccaagacgatattacagcagataggcggaaaacgcttcaccgccatgacaggtagccgtgatttcatagatatgggcaacggcttacggatgagccttgcaaggaacaaaacaagtgccaaccgccttgacatcatctatgacgaaggggcagacctctacaatatgcgcttctaccgcaggacgttcagcaaaaagacctttgagtgcaagacaaaggacattgccgtacacgagggtatctattttgatatgctggaggaaatgttcacgatggtgacgggactttacacacgcttttgagtggcggggcggcgagagccgccctactttctttcagtgagcatgatggcggacaaagaaagtagcaaagaaacctttgtccaatctgcgataactaaaaaatccgcaagtaaaacttgcggaggctatatattgggtcgttattttttggtggaggggaatgataatctcgaaccgttgaactacacatttctgcttcgtctccatttcccccaacgatttgatacgttcaatcatttttgttgttcctttctgaattttcctaaatactttcttcataatttcgctatactttttatggttaataactatgttttgtattgctctcacaacacttacaacttgaagtgttatttggaaaccgataggcaaaaatggctcaacgatgtcaattaacgagaaaatcctacgataatctatcaagtgatagagcaaaagacgtgccaagttaaatatggcacgtcttttgccagttttgtcagtccttttatgggatatacaacagcgcaaactccgcctttctccgtttgagcagcatggcgtggcgttttcctttgtagttgcagaaggctatatactcacggtagatgttcctgtcaccagcttccagcttcttgattaaggtgcttttggggattgttttgctgcctaacagcttcgccggtcccacattgtaagctaacgtgccaagcaaaatcgaatcaaccccgaatttacggaacatggcgacaaatttgcgcaggtctttccgcaaaagttcatccgcatcccgttttgtcatggttcgtgccgaatacttctcgtttggcaaaagtttgtgaccccaaccgacgtatgggtagtgtttttctgagtgccagccttcaaagtagcggcagcataaaaaagcacgttccataagcggcagtcggtagattgccgcctgcccgtccgttccctcttggcggctgatctgcgcggacacagaacagaccgtcagaagtgaacagagcattgtcatgaatacacgcatcatttcaacaaggggctgaagttgccgatgggaacgatggtaagatcgtcgtcctttacattcctgttgttgaagtcaaattccagttcgtaggagttgctaaagttatcctccaccaccacgatgaaattatgcgcctcatcacccgccgccgtgtagtacaggcggaatttttcgttctccagcaggtagcggtcgttaggcaggaaggtgatgccgttatccattttgagcgagccttccccctcgaactggaaatagcggatggtatagagcgtacccgaaaagtcgccctcctttttcagttcacagcggatttccactgtctgcccctttactaccttgttcggcacgggcatgacctccaccgtgaagggataggactgctggatgtccatgtcatcgtcacatgacacgagggtgaatgacatggcggctatcaggcataacgccactgccttgaatattgatgttctcttgtttctgttgttcagtatgttcattgttcttcgatttttagatggttgtttttctgttttttcgttgtcagttgcaggtactcgttcaagtccttgcaaccgtcatagagggaggaacggtcggtgacacgttccccgtatcgcatggtaagtgcggcaagcgtccgccgtccggcttcgtcacggtcgaggaagcagccgatgcgcccgtatccgtccagcaatcccgccgccttctccacgttggcgactgagttcagcacaagacagtcagcgttaccggttacaccaagcgtcacggcagagagaaagtccatgaagccctcgaacacgaggcactcgtcagccgggatgtcattcgcctttaccagtgatacagacttcggaggtatgcaacccttgaaatatcggcttctgacttcatagccacctgccatgttcggaaagccaacggcaaaataccgtttcccacgcacaccgtagttcaagcggcagcagtgacgggatgcgatggcgtaagggatgccccgttcctctaaatactccgtcagcagtgagcggagcagcggagcgacctccacatcctcaaaaacggattcggtcggcttcgagagatagacgggcttttcccatccggcaaccgtcatattggcggcttccgctatgaacttcgcttgcttcatgaagtcatcgctttgcagaaactccccggcaagcgtgaagatgtcgccgcccttgcccaaacgtaggctcggtacagaacgccttactgcctttcggcagtaggttttcccgtacctgcccccaaaccgtacttgcatgtctgttcgatgtcgaactccttttgaaactgtcccgtcgcggggtcgtagagcttgccttgcttccagcctgcctccggggtgaaggccacgccgacgccgtcgtcgccgaccattctgaacagcttgctccgggtgtccagcagcgccttcttgtccaggctgctgatcataccttgcagatagatattatccagataggccgaatagcccgacatctggatcccgaagacggagaggttcgtaaggtcgccgaactgcgcggcgatattctcggccgtaaactcccagtcgctgacattgcgcagataacgctggtaggtgcgcgtcgagtagcgcgagctctgccgggcgggattcgtgaacgagccgtaggctacgaaggtcatcgattccatcgggtcgatctgcttggtaaaggtggccgacagggggcgcagctcgtagcggaactgctcgttgcgggcgcccaagacctccgtgatacggaaatagaccgttgcgaagcctgcgaaagagaagttgcctcggccgtcgtcggaatctgccgtcgcattgttcgacgggtcgaagtcgtggaagatacccatacatatatcctcgaccgctacggcgccgatctcgccctcttcgagtttgagcgttacgagcttctgatccttgtccacgctctcgatcaccccggcgcccggagcgctccagtcatccccgacgctgatgccgacacggtttttccgaagctccggaacctccagaaaacgacggatgaagaggctctccaactcgccggcgcctttttcacttataaacccgcccactccggtaataccggaggcatatgatggtccaaattgtgcccctgcgttgaaagtcattctacctttgaacgtatcgggtgcctgcttgttggcaaactcccatattgcccttcgtgcagaataagcatttgtatcggtcgggaaagtattatcgtatcgggtgattagatatatagccgctccattctccgcaatgcctatacgttgggaatagagcgatgctttcacgtccgattcaatactgcccaggcgggaataaggagtattgtcgcctatcgtataggttgcgatgtactcgttgtatagttttttttcataaccttgaatccgggaaagacgaccgtctataccgaattgaggacccattaatcgtacagcctgtcctgcttcgtagtttttttcgttgtgtgtacaatacacgggattcgtttcacagtcatagactgtcgtgtcgctgctatgtttggcagcataggaagtgccgacctcaagaagttcttgttctgcttcgtctatgcgttgctgggggagtttgacgcctgtgagtacgaaagtgtcaggccctcggtcatcatcttttccacgaggacgcatgttttcattcggtataatctgctgactttcgccggacgtttcgacttgggcgatgatttcaaatttcttgttgaatccgtcttcgggtttccaggtcgcggggtcgatattgtcgccattgtcgtcgataagggcgagttcgaaatcccagccgatcaaatcgccgctcgtaaaatgtgcccccagcgtttctccttcgattacgtctgaaggtagaaatggcgtgtcgttgcataccatgacgtatgccttgtcggtctgcccttcaatgattgtccgatcgatagtttctaccgaagtgacggtttccgtgttcttcgggtagatgtcgtcgaaaaacactacgacttccttgatttcgttttttgtaagtccgggacgtgcgtctatgtattgctgcccatccggaagccgtaaccggacttcggaaacgtggttcgttacgccgccctgttcggattgtccgtattctttcgtcaggttgcgcgtggagccgaatacatagaaacgggtcccgtattcggaatcgtcccctttcttggccgggatgcttttgacgacttctccgcgtttgaatgtttccggcgttccgaagttcagttttccgaaatgcagggttacgatactgccgttctcctcggtccaccattcgacatcgaaagtctcggcaatggatgataaggcatcccaacaggtatcgccattgaacgatacgagcttgttggtttccggatgttcgacatttacacttcccatctgccagttgtttcctcccagtgccttgttcatgttggcgacgatgagcgccccgaaggatgccaagtctgtcgtgttgtggaatacagcttcaggattatcgcctcccagccagaagcagatgaaatttttcatgtggttttgctgcgcctggaactgaagcgtgtatttgtagccgccggttttgttgtcgaaatccggataaacctccgacatgatttcgaatttgcggcctttgtaggtgatgtatgatccgagggggaaatccagcggggtaagcaaactaaaggggagttcgatgtaataatcccccataagtgcgtatttgataatggcactcgttgttacgggcgcatcgtatatcgctttaccggaagggttgtatattgtcatttcgtcgatatatgtatcctgtgccatcacagggtcgatacaaaagtgtggggtttcggcacattatgcaagtaattttaagaaaaaatacagaaaaacgccccggtcttttgaccggggcaagagggggttgcttccatccgtattttaaggtttaagccatgaactttgcggcttaacgattagacgagcgttgttatatgccatcttcaatgttaagcatgtgcgcgctgtataggtattattccctattttatgcgtggctaaagctaaatccggattgggtgatccaggggtaaggcataagggcaacagaagttgtattttcccttcgtaatacagggggacagctattttgtaatttgaccttgcttttttttgggcttcattaatcgcgccaacgagtcttctgcgcatttcgtctgaactcagcccttgcatgtgtgcaggaaatctgtccatgttgtccgcaatgatatggtcgatttgagggactaccctgcattgaggattgaaaatcaaatcctcgggtttctggaaaaaatcagcaatgtccggaatattatcgccgaatttgctaattagctgaatatcgctttccctgacaaatgccttgaaaacataaggcgataaacctttctcggctacatctggcctattgttgcgttcagcaagagcaaatatgctttccaaatttgcagttacaagtccagtattgaaacatgcaaaattgttatcagaagaaaaggatattttattttcagatttaattttgcggaaagtatgttcgatataacttttcaaaatggaatatttggcttgcgtagcatctgagaaatcccatggttccggatctgctatattattcgcaagatattcaatagatgcgtcataattagggaaccaacaaaagtcaaaaagagccgaatgaaattttttcataaacgtaagttttttatattgtcaataaataaaaagaccgccatgtaatattatgacggtcttattgtatcctttatgttcgatattcgtggttacggatagacccgtacgtctatatttcattaatgatgcaaatataatacacgttttttcgaggtgcaaattttttgccaactttttagttgcactatgaaaacgtagccgaatacacgtttattgtcctaacgtatggaaatgataaagagcgaaattcgtaagattggagaagaactgcaattgatttgataaggatggggaggggctaacgcatcattttacgatgaatagcagaagcgagtaaaaggctgggatagattcccgtcctttcctattcgcgtgctgcccgatctgcggggttgggttcgttaaatttcactgttaatctcgatgccaggcgatcggcttctatcatgtagctgcctgaatcgccgacgtaggtcaaatgatacacttccgttcctaatgccggtatggacagggaaatttctcctttttgcaatagagcgatgaaatttttgtaattggtaaggtgttctgtcgtagtattaccaaatattgtgaaagttaatgtcaaatcccgtgatgccaacttcggtgtttgaggataaataacctctttaccgttttttgtcggatcgtcattctcgacaaaacttttcaatgaagagggggatagtatatttcccagaaaatcgtcgcccatcgcaatccctttcgcgtaggcgtccgatccgtttatcaataaatctccgatcattttttatcgtttaaggctttggctaaatataattctgctgtatctatgacatcatatcctttcgaactcacgaaggaggcgtagaacattccatctccgaaaataataccggtccctgctttattttcttcgttcagcagtttgtttgtggcttcggcagctcgtgggtcagggtggttttgatctcctatgaatcgttttttctctttcccgttataagttacgacatatccgaccgcgctccgaaggttccatgtatgattttgataatcggattttgcctgttggagagcaacggcctgccgtgcttgctcgtcgaggaatcccactacttcgggttcgattcctttgatgaatgcgtccaaatcggctatgtctttctctattttcatatagtgcaaaatacgctattattggcacattgaacaaaaattccgatgcaaaattttgcgggggggggaattttgtacttttgcaatgtctaaccaataacttattgtattatgaaaaaatttttactcctttttactattgctattttcgtttgctcttgtggggttacgaaatatagccaaacgacttattttgctgatttcagggattatacaaaagatggattcacaattacgccaagttcatccggctttacctataaatctattggtgatatttcaatagatttcaaaataggcaaaaaagatggatataacaatccagatgcagagtttggaatggagcatatttttgtcccaacatatgattatataactgcagaaatggtgaaaaaagcaaaatcattaggagcaaatgcactattaaattacaaagtgatacccatatatagtgcaagtaagtatggttcttcgattataggatatagcgccagtggattcgctgtcaatttaatcaacgttaaatagctatgagaaggttattattaattatactttttgctgttggaatttcatatgcagcatcagcacaacactataaaggcgatattagtatttcgtatggagtaggcgttggacaatttggtacagataactatggctttcaaaccacacatggttatttattcaacaagaacttatttgtcggagcaggtatcggctttcttaaattcaaggatatagatagtggagttatacctatatatgttaatgtgaaaggattattgaatgcggatgcgggtataagtccatatttgtcaatggatttaggatacggagcgcgagagggaggaggtatatactacgcacctggtatcggtgttaattttcgtattattcgtaatatgggtatatctgtaagcattcactatcagtcaacaaaaatatataatgagaatattggtagtattgcattaaagataggctttaatttttaaataaatagcccccttttgggggctataaaattataccaaaattctatttcttctttacgtatattttttctcccaatggcatagtgtcacctgttatgtacccaacagttgttacgccgtcttggaccattgtaattttaggaggaatatagatataatttccttctccggacatttcaaatcggtcttcaaagtcgtcttcataaccataccagctaaattctgattcagatgtgaatgtaattaaatcataagcaccgttttctacacattcccattccgtgccaacaagctccgcacttcctttttcgtcatctttcgaacatccaacaaataccaatgtagccacagctacaaaaaggagtaaaaattttttcataatgcaataagttattggttagatgttgcaaaagtacaaaattcccccccccgcaaaattttgcatcagaatttttgttcaatgtgccaataaaaggatatttcgtacaagaatttttggctgtttagataattgttgtatctttgcaatgtctaaaaccagtgggcaggttaaaaatgcccaacaatatacgtgtgggctatttttatacctgtttaataggtgtaatatatgcgcgtaccctgtgcgaaacagaaatgttagcaaaagttccactggactttagacaacaggtagtacgcgcttttttattattttatgtctataaccagtgaacggggcgtacaaacgttcaataattctctatttggagaattaagagtaaatcaagcggcggacggcatgatatggttttgtttgtcggatgtctgtcagtcattaggactcggcaatgcaagccaaacgaaatcaaggcttaagccagagggtatcactactaatgatacccctacccaaagcggcatccaacagatgctgttcattaacgaaccaaatctatatcgctgtattttccagtctcgcaaaaaggaggcagaattattccaaaactgggttgttgaagaagttcttccctccattcgtaaattgggtggctacatggtagtaaaagagaatgacagccccgaaattatcatggctcgtgcacttcaaatcgccaacgagacaattgagcgaagcaagcagcgtgtgcagatattagaaggcgagaacagccacctgcaagagcagaaccgcatactcgcgcccaaagcccagtacaccgacgaggtattacagtctacctcgacttatactttaactcaaatcgcccacgatttaggattacgtagcgtccacgccttgacccgcatactcatggagaaaaagatgctctaccgtcagagcggacaatggcaacctacagccaaggtcgccgacaagggctatttcgatacccgcacggccaaattagttaagtcggacaataccatcggaaccagcatgactacggtaattaccgagagcggccgccagtttcttcactccttgatcggaaaggaggtgtcgttatgagaggctcaatagctaatacaacgatttccgatcttgaggatcgcctccgggcggctgaagcggcagtagaagaatcccagaaggcatatatagcatgcagtgaggcatatatgagcctgcaaaaaagttacgatgccctttttgataagtggattcgcctcacagaacaacagagccaagcgcgaaatgaacagcttgaacggatgctgtcggtcagaaaagaatcgcaatacgcgcaattcgtgaataagtcgaactccaaactttgttagctatgatttacgaattgtcttcggacggctatcggctggggttattccccagcgaagccgaagctattcatcacgcagcctacctgccgaagggatgctacaaaattcgagagtgggcgattgacggtgagtttatgatattcgatacagcggttaattcagaacgtgagattaacaactaaaatttgcacattatgaacaggatatatgtaaataaaaagtcggaaataacgatgatcggcaaagcctttgaaacggccggattccgttgcctgcggatcatattggcgtgtgattgccaccagccgggatcgggcaatcggagaaacggaatgatcgtcttggatggcgacaaacttcttgtggagatcgttcgatgtcgagggtgtgcaaaaaatcaataatcagaaaggggctttatagccccttttctcattctgtaagtttcttcgctatatatttgccgtattccgttttattgccgttatgtcctcccttatataggttaatgtatcgttcattgcttgggttgtagtattgatttcagcgacttcaagataggtttttacggcgtattgcaacagttcattattgatctgcacatttcggacagcagcaatctgaatgcttgttatagacgatataagtccgataatagactgtgtttcggtcataacatatcctcggatgtcggtaacttttccttgaatgtccgtgaagcgtccattaagctcactcccggtatcttgcgacatagcttgaaatcctcgtgatgtagccgattgagttgaaacactctcttcccaatctaatcctttttcggcagcaagtttttttaatgtttcccacaactcttcacctatggcttgctgggcgattacatcatcaagaatcgtattgattgtttctgttattgccccaaagcgttcttcgtccgatagggattcattttcattgattgattttatctgttctttagctttttcaatagctggggctattgttgcagtatatataatatctttggctaattgtttcaacatatcccctgcagcctccccgaaagcatctgccgcatccgcgccactttcccaggcatcgacaagggcatcagccaaagtattgcctaaattgttgaataaatcagagaggtagttattagatgcttccaaagcctcttgataggtatcccagtttgcaaccaagttttgtatcatctcctgattttccccggataaatgttggaatgtggcgcctccttcctctgcgaattttttcagtgcctccatatttaacgagccgttttcgtcgaatagttcagggatcaaatctcccaaagatgcgtatttggcagatcggaaccaagtcgagtggcgtgtttgtacttgcatattcgcaatggattctgcggctgattcccattctttttcatatttatataactgggatagacctgtataactaattgtaccctcacctggaaatccgtttttttcttcacctcgctttttaatttcctccagtgattcttcataatctttaagggctttacgcgctacctctatattttgtataaaagcgccatattcatctttcccgaatatattagaaaattcttcggcgttgatcttgactcgttcattcatgaggcgcaactcttcattaaattcatgggctaaacggatgtttctttcccaggaagattccccaccaccaaataaactaaatgcaccttgtattaattgaaatccggctgatatagctgtgagaacgagacttgctttttccaatgcggacattgcagtccccgctgcacttgctgcgtctgttacgccatctattgtagcgataaggtttcctgcggcacttgccattgttgcgatgaaagtcgcagcttttcctaatccttcatcaaattcgctcaaggcatttgccgcttcgcgggcggttgcggataattcattgagtaatctggctccttcggcccaattactgtcggatacctctttttttgttttttcgagtagtgattttaatacggcaattcgcgctttgagcttgttgatcgtatcaatatatccggcagcttcctgtgtgccggaagatgcgagcgcgtcataagccgcttcagcggctgctaattgcgcttcggcttccgaaagcaattcttcaagatttttgactgacaagtttacgatttcctttgcccagtcggaggcttgcacttcgaatacagccaaagccgcatctcgttcggcttggattgcagctcgcgcaccttcagtggtcgcttcggccatcttacggtcataataatctttggtggcctgcattttctcacggaaagtgccgtatttcatataatattcgtcccagtcggcttgttcttttttccagtattcggcaaagtttgtgtctatgggtggacctgcgatcgcttcatgtcgctcgtttttgcggcgattgtcgttttcctgtcgaagtatagcgaattgctcttcttgtttttgggttagttttccctggagctctatgatgcgttgttctgcttcgttgatcgcctctgcccgccgttgataatcgagttctatttgtgctactcttttctctgtcccatccttcattaaatcaatctcggcttgaagagcatcatcgcgcagcttttggagcgcttttccgagatcgttcgaatttttttcctgttgtgaagccgctttttgggcatcttgttcggctttgcggcgggctgcctctgcttcggcatttttctcttccacagtggaggaagtaaggagtttttcaaccgcaggagtaagggcttctgaacccttatttattgactcaatgaatgcattaacatcaccatcgaacttatcttcaatttgatcccatattcttttgccctcatcgcccagcttttccaattcggaaacaaattcttttcggtattttctaatgccagatgttgattgggcataagccctggcacttacaatcctttcatgtccagttgaagttccaatagttttattcctctccaaatactcttcatacgccttattatactcttttagagcattggcataattcttataagcatcgcccgtgaattcaatatattttatgtccttagacttctctgtaataacctcttgagccgcccgtgcttgtgcggcttcaataattgcatctcgtagattgttgtaagcgctaatagcattcccgaccataacttgctcttcggacatatttccgaagtaggcgggatatatttcctgtaatctttcgaccgctttttttcgttcgttgtagggtttagctacatttgttgctgcccggtacaataaatcgagtttggtaatttcggcttgagcggaaattgccccttcagtcattgtcgcgtggaattgctctgcggcttgttttgcggcatcaaaagcctgtttccccttgaacagcgagccaacccattcggtgatttccttgccgtaaagggttaaaaccgtgattccggcaaccagaagcgtttgccaagaaatgatcgatttaataacctgcttccaaaccggtgtgaatgattggccttcggctttgagttctttcacccgttgtcttgttaaggcgagctgatcggctaaaatgggcaggttgttggatatggcgaggaagaaggtttgcgggcttatggccagcgccggtagttcccgagcgacctgctggattgagaacgacagtccattccaaccggaagcataattaccgacattgcgggcatgaactcccatcgaagcgtcaagttctttgatctttgtgtcgagagcctgaatgtttttgagaaggttttgaccgaatgtattcccgcgttctccttcattgagcgatctgtaaacggtccgcatccgagcgagggcttgcgacatttcatctatagagccatgtgcgacttgctccagtttgatttggttcgcaacctcttggcgcattcgtgaaatagcttgcttattttcttcataagtcaaagataaggatgttcgacgggcaatttgtttgtccgtcaaggcgaagccattctgctcggctttattcaaagcatcatattgtgctttcagacctcggtttgcggcttttaactgttctatttgttcgatattttcacgctttgcaagacttacagcgtgcaattcatccagcaaaccgcgccatgcttcggcttccgcattggcagcctgtgctcctgcggtagatgcagttgacgatggggtagatagtgattggggctctgtttgtgagactgtttttgccgcctcgttctgcatttgagtaattcgctttattgattgctcgacacgagcctccatttcagcgattttcttatttacaacgtcaaactcctttgttcctgaaggaatagtagccaaaacctgtttcaatcgctccagagaggtgataaaactgtttaatttatcggtttcggcgtttattttgaatgataatgcgctcatttgttcttttgtcttcttcttgcggccatctccttgccgctgcccttgactattttcttttcatcgcccacgagcgatcgcaccttgtcgatcatcatcaacatcatagtggggtagttcactttttcgaaggcgtcacggtagctgatgttcaggtgtttcatcatagtcgccatgatgcccgcaatagagttgttcccaatagtttctgtgatggttttcttgcgtgttttgtcgattttgactgattccagcagatcttttcctgtggtgatgtcggcgattttctgtgctgcgattcggatttgtcggtaatcgctgtagcgtccggcgtaccataagaacagtcgttgttgccaacggcagtgaaatagtagctttgacatagttttcagcgaatatcgttgtcgcccgtcaatggaaaggtccagccgttcgtctgcgaaagcccgtgcgagatccttgatatagggttggtaaaaccggaaattaagtcgcccgatccgtactattacatgatgtttgttcagcaatgatgcagcgacgatgttggcggacttactcatgatcctttgcgattgattgtgagagctgctccataacggcgctgataccagccatatcctccaaaggaatcatttttagagttttgttataggcgtcaaacaattcgtcgagtgaggctttttttaggaattttcgccggagcacgatgcgttttaatatattgaatatgtttttgctgtcagatatacctaaagctacactttgggtcattgccttaaggcatccgatacttttatccagctctttttttatgtcccgcgcctgcataatgcgtatggcggtcagcggggacataccatatatgctataactttttccggctatgcggaagctgatgaaatccatatcttgaaagcttataaataaaaaggagcgaggggcttacgcctcccgcccctttgtcgatgtgatataaggctgttatttgcttgatacactcattatcgaagcggcatccgtaacctcagatgcatcgaaccaatattcagacgatacatccgtattgtcgggctccagtgctgttgcgacgacactgatagcaacggcatcgtctgtttcggcatttcgcgccacgatggaagcctttgggaagacgcagtattggtcgtcttctgtaagtgcaaccatgcacttctcgatattagtgacgccacgtgcccgcttccaggtggtttccgttcctgtgccacccatgaatgccgccttcgtttcgtagtcgtattggccgatggcgaagttcatggtgacttcacccatctcttttgactgacgatatatgccgtcggtgagctgatttttgtattgtgttgtggagggctcggcttcatcgaggctccacgtgtcctgatggacattcggcaccttcttggtggtagggtctttgaggatggttcccaacagcgttcctgtcagatcgcccgtgactttcgcggggtctgcataccagatgtttttgatgcctacggctgtaatagttgccatatttttaatctttttttacgtttaacactctgaacagaacccggacatagacatagtggcacccgaggtctttatcctcttcacaacctatattttcgtatcggtagtgatatgccgtattatcatattgcccataggtccatgatttgaattttgattttgcagcccgttcgagttctttaagccggtttcgatttgcaattcccttgatgtccgggatacatagattcaccgagatgtaacaggattcccagtaagtcgccggagattgttccgatggcgttacaactacgattcgctcgttttttattctgccttccggaacatcccaggtaggaaatgttttaatcccgaaatcagtgcaatcacgaatcaaaatgtcctgtgcatcgttggtggttatcattgtgcaatccttttagagccatattttcgtgtattcatacctttgtccgcttttgtagaagccttgcactgggtacgacaccgaatcttctaacgtggaaccgataggagcaccgagacgatggtcgaatatatttttgccgcatctatcgaggatgcggacctcctcattttcttcgagggggagtacattctgcggcataactacctcataggtatattcgatcacttttccgttaggcgattcaatgaaccgggctttgccgtcgtaacgagcattacagcggctcaccgtttgccattcatccgtgttgtgattccaacgttgaagtatatagggaaatcggatcataagaactttacggtcggttgaagattgaattcgtcggcaatatcggttaggccgttatcctttgcgagagcatgtatgcggcggcgtaattcctctacattatagccgatagaatatccgccgttgccttcggacgccagaacgataagctgcttcaggatgtcaatggcggctttcgctaccgaaaccttgttggctgacgaatactctccgtctgccgacaaccctgcatccatgcaggctactgcaaccaggttgtcgtccacatcataaggatagagccgtgccgatattacttccgaattcttcattgacgataagtttaagcgttaccttcgttccacgaggtattctctgtgttgatgtagtacagggattgccggttgatgagtgccggcatgatgtacgcttcggccagagtaacttcgagcattgggttcagctccgaatagcgcgtgatcttcacgttctcgcggtatgcttgcagtgcatcggtgtccgaaacctgcgggacgtcgctccaccaggtccagccgagctgcggtgtcggcgacagcacggcgacattctccgcccacggcttgtaggtcgtctgactgccgtcgcgtgcctcccgcttgacgtaggagtcgatcacgatgatctgcggatacccttttgaacgcatgtaggtattcacgaggtcgattgtgagcgtgtcgctgcttgccaggcccgtcgcagtgaggacgacaggcgaaacccgtttgacggtcttttcgctcatcagcagtttgtcgaaagccgcttgttccatgatagcgtacatgggacggctgaatccttctttctggatggctttctgcccggcgatgatgtcaccgagcggatcgctgtcagacgatgcgctccacttgtttttcacgccggttttgtgtgccgaagggatgttgaagtttagcgcgttctgcgtcaccacgtcgttgttgttctcggttttcagcacgatggcagatttcgatccgacttgaaggtccaggtcttcggcgagatagttcacaccttcgtagcagaattgtacgtcttcatagaccatatctacgagttgcagtgctacattggggttgccgcttgactgcgcatagctgcggaggatttgatactctttgatctgtttctcgtctttttggcgagaaattgcgactttcgcaacttgtccgctccaagtgccgatggttttgcgtgttttttgcggcgccttcgcgttgaacgcgatcacgtctgcactcacggggattccgtcgttcccttcaagagacttgatgtcgagtgtcggggtgtaacgcaggggaaacagcgtcggccatgccagaccggaccccggcatgtacgagttcaattcggcctgcatatcgacctgcaaaaggtcgaaaaggggttttctcatgtctgccatagttaaacgagattaatggatttgagatttgcgagaatttcgggagcgatattggtcgtcacggcacggacacttgctccattaacaagacgtacgaaattgtttaccgtaccgccttcgagcttgttccccgtcagataggctggggtgtaaatggcttcagcacccgacgctttcgctgattttgcctggtaaccttttgccccgatagcgacggttgtgccgaatgctgcggtcgttagtacatccttcgatgcgtctgagctgttgatcgcagtgatggcgacagcttttccaccgaaagcgatgaactcaccttgcttgaaaccggagcctttggcgatttcgatgttagtgtcttcagctccgatggctttcacgagtgttgcacctttaatcggtttgtagatgttaccggttgccagtcccacaacggaaccggccggcagatctccgtcgagctcggttacatcgacggtaccgccaccttctttttcggaaaatacgacctcgaacaccaccttgtcgggttcgggggcatcatagaatttgttttgccaactcatgtcgattgttttttaatttagacctttgatcgccgaagttttgtaatcctcggcagccttcttgcgatccagtcgggctgccattgccgcagacattttatctccactttctccgcctccgaagagaggcggtgttaccccgattccactcttgacgaacattttggccgctttcgaaagaacctgatctacgtcgtcattgtcgtcgattttgatgatggaaagcgtgtcatcgtcaagtcccagcgcgtgggccttttcacggattgtcgcagctcgttgtgcctgcgtctgcgctgcttcgaatccctcgattttctccgtatagggcttcatggtgttttggataaaagattttatccgttcctcaaatgcctcgggatcgaaagtctgggaattattcttgtttccgggttcgagttgctgctctccgcccccgggcgcagggattacggactttccgtctttgaggttatgcttcttctcgtagttgcgtactgcggtctgtgtggcatcccctgcacggtagtctccgtagctttgtaacacgtcttgaaatccaatcccctctacgatggctggtaattgggcttcatccgtcatagcctcggccttattcgttgcgattcggtcgaggattgcactatcaaccccaacaaatttggttttgagtagtgcgagaagtttctctttcatgttttttcgttctatatggtttcgaataaatcatcatattcgcacaaaaaaggtctgtcagccgacgccaacagacccactaacaattacatgaaggttatatcgttctgcaactggtgggctgcgacttcacagcctctgcgacaaaagtcagtatgttcggcacattatgcaaattattttaaggaaaaattcgataaaaagaggagaataattctcgccgataattgactatttttcggctaaagattctaaatttttcttttgattatctggtatatctatatccgatgacctttttccgatttcagccgctctatctctatttttggatctttgatacgtggattttggtaaatggcggtttcttggctcattgttccggtgttaatggatttttggataatgtcgagcgtgtctgaaacattgtccggcataggtgtcgagaactggtagccgattttgagtgcttcgagctgcccgttgagctttaattcaggataaagtacaccgatgacagcttttaccacattaatttcccgatcaatcattgctccgtagtagtcttggtagttttttgcctttaacatcggaaaaaagaacatatattcccagcttacaccgctcggaattttcatttccttaatgacatccgatgctggatttacggaacaggtcatgccataaatgaatgaatcgagtgtgtcgcattcccgtttccgattttcgggagcagaatcgtatgtcagataatagacttttccattgttttgtgtttggatgatttgtgccggatcgtcgggattgagggagccatccacaatgccttcccctaccactttgggattggcaaagtaatcgttcatatcagcgtccctgcactgaatatcttcccgacgttcgattagtttttgaacatctgcccattctggctcctgtctgtaaagtaaaaccgggattttcccgataaagttcttttccgggaggacttcccacccgattgccttttgtgtacaacgaaagatagtttcatctgtataaatgtcacaatgaatctcgtcgtttccctcgtcgtcttgtatggtgaattggcggataaatagcattagccgtccgaaatcgtcgaatttgtagtatatgtcgtccccgagcgattttgcgagtatctttaccattacctgaatttcgccattggttgataggtaaagatgatatagtttagcacaaagtgtttctgacccggctttcattttacactcacggatattggaatcaaagcgggtatcttttaatatttgtagaaaacgactgtaggcatcttctgctttgctttttcgattaagttctccattgatactggtttctattacatctgaaatatctgagaactggataggagagccgaacaggaaagccgtggcttgtaggttaatgactttttggaatgggatgggtaatttagctgtgatgatgtccggtttgccttttcgatgacgattcgggcgtttagtcacttcgtgtttcgtaggatcgtattctgcaagagctttggtgattttatcgttgcaggtcgtcattttactcaacaaccgggagatgtcgccgttctgtatgagctcgacgaacttctgtttgcgccccaaaaccgtgttgaattgattggagagggcttgagtgatttgtttgatcgttgtcatattttatagtcctaaatcttcttttgaaagcggaattatttgtttgtagtcgaaccatacccgcatcagtagcgcatccctccagtcgggagagcgtccgatgtcctgtttgatttcgtctttgggtttcaggaacagtttgcgatcgttgtccacattccaggtctggagttgttctaattcttcggtaatctcgtctttttgaccatccgacagttcgcagtcgaaggatatagcaaaagagttgatcttattggccagcttgtatccgcattgcgtctggaggttcgagaaattttctccgttgagacattgcgagttattgacgaatccgctaatccggcacatatcgaccactccgccgcccactccgtcttcgtcagcgatgatccgatagcgggggatgcggtgtttggcggccaatgattcgatgcaggcggctatttccgtagtggcgcttcggtcgaacgacacctgttcgatgatcgcccagccatcccatacgaggattcgcgcccggtcggaaccaaagcgggcaatatccgccgtgatgtatttgatgccggtacgggtgtgaattttaggatagaatatctcacgaatattatcataggaacatagggcatttggattgtcgtcatagtcccagtttcccttcagcaatcgctcctttttgaccttatcggtggtagatttcaatgcttctatataatccttttcaatgaatggattgtcttgtacaagtgcggcaaggtatatttggtggcccgggagcgtcccagctttcgctggtttgtagaatgttgagtgcatccagttctttttcggattacaagaaatgaacagtttgcgtaggattccgtatttgtcgttcaaatgacgcccgatgcgggttttgagtgtgtcgtaagctccaaagtttacttcgcctccttcctcaatccatcctccggtgtattccactgaaccatagcgctcatagagcggatcggaagggagataacgcagatcgagcaggtcaatcctgctgttattggcaaattgaatgtagtggtcttgtccgttatatttgaaatctttgtcgcgctttataccgtattgggtacacaccttgaagaaggtgataagcgtagattctcgaaggcgctttaactcttcgcgcccgataaaccattttgtccctggatagcatagtgacataaagactaaccaagtacaacctgtccacgattttgcgcctccggcggctccgccgtatagaaattccgtatgggttttatcggtaaggatgcacagcgcttcttcctgtttgacatgatgccctcgttccgacaaggtaataaagtcgaaaattcccctacggaacatttcgcattcgattttaacttggtctgcgataagtttatttatcggatttaccattggttgctttatggattagggcgtgcgctgcgagtaggtcggcattggataatccggagtagtccatagtggtattgatctcaatggaattgccgtctttccctgtatgttctgttttatccggtgcattatatccgagcatgcgattgatggtttcgatggctttgctcttgtccatcaattctacgacgggacatcccgatcggtcgatttttatggattggatcaaacgtcgcttctcgggaggaagtgatttcaggtcttgaaatgtaatggacgaaacttgccggataccgaactcggtattttcttcaaccatatcggcattgacgaaatcaagtatgtcagcattgataatcgagagattgagccggacgatttcctctttggtaattagttctttcttcgataattgagtttgaagttctttcacccttgccgcaaccttgacgtctgcaagaagtgacgacgctttttcccagatagatttgtctgtcattcgggaacagtcgtatgcaaagcgatacgcctcggaagcgttaccgtattcgaggtacttgttgcaaaacttctcctgtttgatcgtcagcttttttgcatttgccatgttatttcgtctggatctgcttcctatatcttcataggttcagaggcaaagatgaaagacttcggcacattacgcaatttttacaactaaattattattcatcaataattgtttagtgtaaaatcatctccctctcttaattcgtacgcatatcacagttgttgtatttgttgtactaaaaaacatagataaaatgacatatatcattgatgttttatcttgttactttgctatgtatgtgatatttgacattatttaataattttcgttaatatttgtatgctcccgccacctccacattcggcgacgttccggttttccagaacgtcgctttttgtatgcggggcatcttactttgcaaagcttcatcccgcttttcagacttcagcagcactcggtcggagggggaatactatttttatcggtatttcgaggaattctttgatcgggcggggtatcccgcagttccggatacagagatccatgagtctgtcgtaaatcggatgcgtcgtgttccgatcttttgcgggttctttgtaatccggagcagtactccgatacggataaattcgtatctttaactcggtttcagatactccgcctcggcaaaatgcaaataaaaatttgcttttgcactcggcttattcgtaatctttgacttcgtcttagatacttcgcctcggcaaaatgcaaataaaaatttgcttttgcgctcggcttattcgtaatctttgacttcgtcttagatacttcgcctcggcaaaatgcaaataaaatttgcttttgcgctcggcttattcgtatctttgccacgtgctggcaggacttttctatattcttttttgctgggcgctggggaacggcgtcagtctgcttatcggcgggtatctgccggggagtatcgtcggtatgatcctgctgttcgcttctctctgcctgcatatcgtggatgcggagatgatccggcccgccgctcgttttctgctgggcgctatggccctgtttttcatcccgtacggggtggggttgatggtatcctacgaagtcctgctcgataatttttgggcgatcgttatttcgggcggagtgagtacgatgttggtgctggtctgcgtcggaagggtttttcaaaaactgaataaaaaggcgtgatggagcagttcgtcggatcggatctggtgttgctgaccctcacggtcggcttttattgcctgggaagtgcgttatacagtcgaaccaagttcgccctgctgcaccccgtgctgctcggtttcgtggcgatgatcctttatctgaaacttttcggtatcggttacgagcattaccgtcgttcgaccgagttgctcaatttcggactgggactttcggtcgtggctctgggttatctgatgtacgaacaactcgagcatatgcggggacggttgcttccgattctcgtgtcggtcgtcgtcggctgcgtggtcggagttcttagtgtggtttatctggcgcgtatgctgggggcggatcggattttgcaaacttcgcttgctccgaaatccgtgacggtgccgatcgccgtatcggttgcggaaccgctcggcggcatcattacgatcacctcggtcgtcgtcttttgtgtcggtattttcggcagtctcgtcggtccctggctgcttcggcgttgcggggtcacggatcctatggcacagggattcgcgctggggtctgcggcgcatggcatcggaacggcccgtgcgatcgaaatcggtgcgctggaaggggcgctcagcggtttggctatggcactgatggggatcatgacggccctgctgctgccggtgatcgagaaattcctctactgattttttgtcttccggaaaaaggattacctttgcaaaaattttttcgggcggaagcgtaacgctcggatgcggcgatgtccgttccggacgcaatgcgcggtatgtttcgcgccattttattaaaatcaatggtatggattggctctactctttatttgtcggtggcgggatagcccacaccgtattcacgctcgcattggtgattaccgcaggtattctgttgggcaaagtcaaggtttgcggtatctcgctcggtatcacctggattttgttcgtcggcatcatcgccgcgcatttcggtatgggaatcccggccgaagtacgtcatttcatccaggagttcggtctgatcctttttgttttttcaatcggtatgcaggtcggcccgggtttcttcgcttcgttcaagcatggcgggctgacgctcgtctgcctggcttcgacgatcgttttgctcggggtaggcgtggcgtacgtgattcatttggtatcgggtacgccgattcccacgatggtcggcatcctttcgggtgcggtgaccaacacgccgggactgggtgcagcacagcaggcttatgcggacgcttcgggagtcgaagaccccagtattgccctgggctatgccgtagcttatccgctgggcgtgatcggtatcattttctcgatgatcttcatccgttatgctctgcgggtgaaattcgggaaggaggatgaggcgctcgctgcgatttccgcagaacacaagatggccgaaatcgtttcgatcgagtgtacgaacaagatgttgagcggacacgacatctcctatgtcaatgagttgatcaatcggaaattcgttatttcccggatcgctcatcccgacggtacgatcgtattggcggacagcaacagtattatttcgctcggggataaggtattggtcgtctgtgcatccgaagattgcgaagcggtgacggctttcatcggtaatcggatcgaaatgggggagaaggagtgggatacgccggattcgaagctggtttcgcgtcgtattctgattaccaagccggagatcaacggcaagactttcgccgatcttcgcttgagaacccgctacggcatcaacattacgcgtgtcaatcgtgccggagtcgatctgattccctatcagggaatgcagcttcagatcggcgatcgcgtgatggtcgtggggccggagaatgcgatcgagaaggtcgccgccgtattgggtaattcgctcaaaaaactccgtgagccgaatctggtgacgatcttcgtcggtatcgcgctcggtgttctgttgggttccattccgttgttgaacgtgccgcagcccgttaagctgggtttggcaggtggtccgttgatcgtggcgctgttgctcggccgcttcggtccccggttccatttggtgacctatactaccatgagtgccaacttgatgttgcgcgaagtgggcattgcgctcttcctggcggcagtcggtctgggagccggcgacgggttcatcgatgcgatcgttggcggcggttaccgctggatcggatacggtgcgctgattacggtgatcccgttgttgctggtcggtattttcgcccgcgcccggctaaagatgaattactatacgctcatgggacttatggccggtagtatgaccgatcctccggcactggcttatgccaacggcacggcaggcaacgatatgccggccttgagctattcgacggtttatcccgtcgtgatgttcctgcgggtgcttacagctcagatattcattctgttcgcgttgtagaactctacgacgcggccccggtcggggcttatgtaacaataccaactcccgcagtcgtgctgcgggagttgtcgcaaatattgcagaagggttgtaatcctgcatcggaaaatcgggccagttttttgatgggagggttaatttcgatattttcagctctattttccgcattttgctatctctaaattaaatgaaaaataacaaaattccaaattatttaggggaaaatagctaatcgtatatttcaataccctgacctgagttgccccggaattgaccgatatgcttcgaggaaaagtcgaaaatcggcccaagagagggttcgggtggaatttggcatcggataacgacccgcaggaccgagggttcctgctggaatctgcgagcagtcgttatataatttaatgtttttgggagcaggcaactccactctcttcagaaagggtttaggaaagaggccaaattataaacgaggtcgcaaggtgtaaataaacggccgtcggataagggatacattgaaaggtatttacttgccagtatagatgcgattttgatttttttgggggaataaaacagcgctgtaatcggaagaaagattacagcgctgtttttaggaacaacaccccttgttcgggtgccgggacttgcaatgcggacattcggttttcgagcaacacgaacatccgacatcctctcgatgtcggacaatccgtacaatccagcggacgctgaatccgaggacgaggatgccgatccctattacagcgatattttgccagtccgtcatattataaccaggagaaaaggtgatacgtcagataagccattatccatgccaaagccgtattgtagagtaccgaaatacaggcccagcgccagccgatctctgcggcgattgctacgatggtggcgatgcagggcaggtaaagcaggatgaagaccagaaaagcgagggccgatgccggggtgaaatccccgcttgcgaccaaccgctgggagagggccggagagtcgagttcggcttccggggcgtctccctgttccgaatagagcacgccgagcgtgctgacgacgatctccttggccggcaggcccgtgagaatagcgatgctggctttccagttcaggccgagcggttcgaatacgggcgaacatgcctgcccgacctgtcccaggtaggaattttcataatgttcctccgtcgtttctgccggggcggctgcgtccggcgtcggataataactcaagaaccagacagctaccgaagcgaccagaatcagtccgcccatcttgcgcagatattgcgcgcagcgatcccacatgtgcgacagcgtggcccgcatcgtcgggacccgatagggcggtagctccatgacgaacggcgtttcgtccttcttgaacagataacggcgcatcagccgggccgtgatgacagccacgacgattcccagcagatacagtccgagcatcacccaactggcgtaagcggcgaagaacgtgccgatcagcaggatatagataggaatgcgggcgctgcacgacatgaaggggacgagcagtacggtgatgagccggctgctgcggctttcgatcgtgcgcgtggccatgatggccggtacgttgcaaccgaaacccatgatgagcggaatgaacgacttgccgtgcagtcctatgcggtgcatgatccggtccatgatgaaggctgcgcgagccaggtagcccgaatcctccatgaaagcgatgaacaggtataggatcatgatattcggcaggaacacgatgacgcttcccacgccgccgattacgccgtccacgagcaggtctttcaacgctccgtccggcatccaggcatccacgccctgaccgatcagtccgaccagttgctcgatccactcctggggataagctcccaggttgaacgtgcagtaaaacatcagccacattaggaagaaaaagatcggaaaaccccagagtttgtgggtcacgaaagcgtcgatgatcttcgttacttgcgtctgttctttcttgcccggagtataggtctcccgcagggccccggagatgaatccgtatttctgatcggcgaaagccgtctccacgtcttcatccaacaggttggtgatccgttgcgcttcccgcttgctcgtctcctcccatgcggggtagttcggatggtgtttcagccggtcctttatataactgtcttcctcgagcagtttcatagcgatataacgcggcgggaattgcggaggcagctctccggattccttcaaggctccggcgatcgtccgcaggctctcttcgataaccggcccctggttgatatgaatgtgacgcacacggtcgtcctcgttctcatagacggcgatcaccgtgtccagcaaggcttcgatgccccgtccatgacgggcgacgaccggcaccatcggcactcccatcatccgtcccaaactgtcgtagtcgagtttggcgccgcttgcttccagctcgtcgtacatgttgagcgcgacgaccatgcgagggttcaggtcgatgagttcggtagtgaggtagaggttgcgttccagattcgaagccacgacggcgttgataattacgtccggcgtatgttccgccaggtggcggcgtacgtaaagctcttcgggcgaataagcggtgagtgcgtaggtgcccggcaggtcggtgatttcgaagcggtagcctttgtagttatagtgcccccgcttggcgtccaccgtgacgccgctgtaattgccgacgtgttcgtggcttcccgaaatagcgttgaacagcgaggtcttgccgctgttcgggttgcccaccagtgcgacgttgatccgttttgagctttgggcgatgacctcatggagctggtcgccttcgcgtgtcccgttgtattctccgcttatcaggccttcggcttcttcgttagtgatgactacgaccatctgtgcttcgctgcgacgcagcgaaacttcataatccatgatcctgtaaacgatcgggtcgtgcaacggggcattgagaactacttcgacttttttgccgcgtacgaaccccatctccatgatccggcggcggaaaccgccgtgtccgagcactttgagaatcgtggccgattcgcctgttttcaaatccgataaacgcatgtttttttgttgaaattacagggcaaagatacgcaaatatttcaggaccgggcatccctatatatggggataatccggccctgcagggtttttcgggctatttttccagatgcgccgcttttttgggagaaaaaattgggaattaaaatttttttatatctttgcgtcatacatccaaattatttacgtattatgaaaaatttagtcgaaaaaatcaatgccgagtacgaagtattcgtaagtaacgctaacgctcaggtagaaaaagggaacaaggctgccggaacccgtgcacgcaaggccgctctggaattgagcaagctgatgaaggagttccggaaggtttccgtcgaagcttcgaaataagtttattacttttttgaaaatgaagggtcgcatgggatacatgcggccctttgttatgggtgtacaacttggcaattatatctttcgatgtactatccgattattcggcctgtgaccgtgtttgtaatgctaccccccccctgtttgaggaaatttggcgtgctgcattcccataataacatataatttatataattcttcactgttcgaacaggagcagaccgtaaccggcagaaaattcggtatgcgatacagaggaatctccggaatatcgaaaagattgcgtctgttttttagtagcttaaatcgataccgtgccggcggaaattttcgaggtcttcatccgacaggccggttttcgggaaaggaacggccaggttgtgatcgttcagatagcggcgcggtgcccggtagtcgaatgtcggactgaccaacgagtaggccggatcgatgaagtcgccttcgatcgaagcgatatcggccatgctttgaaacatggagtgggttgtggccggtgcggattcgttgttgcgggccgcttcgactttttccgggaattcccgtcgatattccggcgaaaaccatcccagattggcgacatagagctgataaaaagtggtcgtaggggaggcgtgcaagaagcgctcccgttcgtcgtcgagaatatcttcgccgtgatcggcacagtagagcagcgccgaacagtcgttttcgagcgagcggagatattcgatcgtctgcgagaggaagtggtccgtatagtagatcgaattgtcgtaggcattgacgagtttctcgacgttctttcggttgatggccacgttgtcgtccggcaggaagcgggcgaattcacgggggtatcgttggtgataggtgaaatgagagccgtaacagtgcaggatgatgagcaggtcgtgctccgggtcttcggcgataacccgtttcatcgcttccagcagttgcatatcgtaacgtggctccggaaggtacaccaggctgtctgcatccttggccaacttgtcgatcatggctccctgggggcgctggttggaaagaaaccaggttttgaaaccagtctccttgaagagtgccggaagccccttgcgacggtatagttcttcgtgttgatcggtttttaccgacgaaagaatcaagggcacacttttgtgcgtggtattgctctgtgtgactgtattccggaatacgaccagaccctctgtgcgggtcagacagggattcgtttccctgtggtaaccgtacagttgccagttggcggctcgggatgcttctccgattacatagacgtaaatctcgcgtttggaagcctcggccgtgcgccgtgcatggtatgtgaaatcctccgaggtgtgttcgaaacggtacatcttgcggaactccgaaccgcaaagaccgatattatagaaaacattgaccggaaaaatgtcggttttcaatacccgcttgtcttcgctcactttataggccggggccaggaacaaccctccgagaatgaaggacgagagtccgatcagggcgatattcttgcgggctgttttcgaaagacagtgcctttgtccgatgtcgcgtgaggcgaaccagagtagcggcagatagatggcgcagacgatgatgatcgatggatagatgtttgagagcagctcgccagcctcttccggattggtcgtcagcaggttggtgaacatatccgttgcgatgatcgaattgccgaacaggtagagcagtacgatttggaaggcggcgaggacgacgagcggaaaggccagccagatcatgatgccggagcgtttcagcacggcgctccacatcaggtagaaacccatcgggataaagagcgatgcttcggccgaccagatggagtacggctccgtatatagtaatacgaggttggggataagcagcgtgagaacgaagtagaacgccagcaggatggaccctctgtcgttatgctccttgaaactctcttttttttcgtgaactgccatatctttcagaacgcttcgttgatattgaacaggaatccgctcgtgtgcttgccgaatccgtaatctactcggatattgatccgttttttgaattcccaccgcaggcctatgccgtagttggggagggtgtacccccatttgaacttttcgaacgagggaaatacgttacccgcaccgccccatacgacacagccgatacgtcgccagatattctgccggagttcgacctggagggtaatcatatcgttgtcgttgtattgtccttcgtagtagccgcgcatacgcttcgaaccacccaggcgggctttcatcagccagggtgtgcccgaggcattgaattcgccgtacagctcggtggctacgataccgcctttccatacccgatgataactgttcgccgtgaatatcgcctgccagagcgatttggcgttcgacccgagaaaatccggccgccaggttcccttcagacttaaataaagtcccttgtagggatttggaatgaaatcccttgtatcgtactccacgatcgcaccgatgcccgtagtcgtgttctccgggttttggccctcgatatattccggccgggtgaacttgatgccccggctgttgcggaaattgacagaggcgccgatgaacatattgggtacgacctgatagaggtatcttacgtccacatcgtagcgtttttcgacgtacgaccctttgggattattcgctccggccgaatagccgataccccagtagtcggtcggctgcgagtagaaggagagcttgtacgaaattcggtggcgattgtggctgaatatgttgttaccgttgattcccaccatgtagaatcctgtcgtaccgcccgtgatgaatgccgtgatgtccgacggcggtgtcagtgaatccgtgcggtcaaggcggtaaagacctgcagccataaccgcgaggctgaattgagtgtctttcgaataactcggccctccgatgaaggtgaagtcgatctttttttcgaaagttttgtccgtgctcgactctccgaagtaatcgataagccgccgccagaacgattttttcttcggggcggcggccagggtgtccgacggctgtgatgcagggatcgaatccgtctgcaacggggtgtaactataccgaatcgtatcgttttctccgatatacaccttattatcttgtgcatacagaggcgatgcgaagagtagcaatccgcaaaagaccgtcaggaatttcgacatggagaagtcttatctgtacttctgtacgacttgataaaactcttttttatcggcatcggagagaggacccttgcgcataaacaccaggtcgccctccttgctgaccagcagcaggacgaacatattgttgcagtcgcccaattgccaggcatcgcgcagggtattgttttgatcggccagtaccgtagcgccgttggaggctgtgcgtttgcgagccatgttgcgagccataccgttgggaatcatcggagcgtctttcaggttcattaccccgaaaccgaacaggttttcgccttccacccggtgattttcctccatatccgttgtgaaatcctcgttctgtttgtggtggtcggggtcgatatagaagatcatcaggtttttctcaccccagtaagggagctgcgtagggtcgccgttcagatcgagtaacgtaacgtcggataccttgcggggaagagacgactgtgcggatacggcaaccgacataccaagcaacggcagtaaaagaagccatagtttcagtttcatacttattacattttaggagattggtaggcgcaaagatacgaaattatttttttgttgaatcttctattcgtcgggaagagttgcgggttcgttgagacttcgctcttttggccgaagccagggcgtcgagcgaatagactccgccgcccgaaattaccagggctacctggattcccagatagacgaacagcagttcggaggttccgaatcctttgccggggaagaggaataacagcgagatgagcagactggcggccatgatcgcggcggacaggcggactttgtagcccagcatgagcgaaatggcgcacaacacttcgatcgtggcgatcgcaacgaaaatgaaagcgctgccgaatattccccacgacgggtaatagttgataatttcattgtaggcctgcattttgcctacgttatgcaggagaatgatcgtaccgatgaacagacgcagatagagaatcgcccaatcggctccttcgtggcttttgaaccaggtttgcagtttattttccatatgtataactaattccgattgaaaaaatacaagcaattcgtattccaaaaaatcattttgtgtgttcagcgcaggtaattctgcctgatcggatgatttttcggtgtttttgaggagaaaaatcccgagtgggacagcgagtcgaatatcgcgggttttcgatgtttgcggatcgagggataaatacgatccataacaggggtgtggtcgagccgcaaagagtcttttcattccgaacgacagagagtcgggaaatccgtaattcgggttatagattccgtaattcatatactgaccggcaagtggggcctgtgtaactttgccttgtaaaaaatatgaatcgtatgaatatattggaaagaatgagggcgggggaattgattttcgataccgaccctgaatatccgtcgctctatgcagaattcgagaagacgatgaagttggtggctcaactcaatagcggttaccatacaccggaagagataagggatctgctcggccgtatttggggacagccattggacgaatcggtacgtatgtttccgccgttctataccaacttcggtaagtttacccgtgtcggcaggggtgtgttcataaatttcggttgtaccttcctcgaccggggcggtattacactggaagacggtgtgttcatagggccgggagtgctgctcgttactgaaaaccacccggagcaaccggccgttcggcgtaacgtatatgccaaacccattgtcgtcgggcacggtgtctggataggtgcgggagctgtcatattgcccggcgtgacgatcggcgagcatgccgtcgtgggagccggagccatcgtaaccaaggacgtgcctgccggggtaatcgtggccggcaatccggctcgtatcgtgagaagtataaaaacggaataaaattaagttttatgaaaatcggaataattgcggcggcattggcgtttgtcggtctttccgccgttgcacagacaaaccaaaaaacgaatatggatatgaaaaagttggaactggtacaggagtgggataagacgttcccgaagagcgacaaggtcgagcatagcaaggtggttttcgtaaatcgcttcggtgtaacgctcgccgccgatatgtatgtcccaaaagaggttgtcggcaagttgtcggccgtcgccgtaagtggaccgttcggagccgtgaaggaacaatcgtcggggctttatgcacaggcgcttgccgaacgcggtttccttaccatcgctttcgatccgtcgttcacgggggagagcggcggtgtgccccgcaacgtggcttcgcccgacatcaatacggaagatttcagcgcagcggtcgattttctcgccaacgaagaccgtgtggatccggaacgtatcgggatcctcggtatatgcggctggggtggttttgccatcaacgctgccgctaacgacacgcgcatcaaggttaccgtcgcatctactatgtacgatatcagccgttgtacggccaacggatatttcgaccaggcggacaacgccgacgcacgttatgagatgcgccgccggctcaatgcccagcgcaccgaagattatcggaacggttcgtatgtccgtgcaggaggggtggtcgatccggttccggccgatgcgccgcagtttgtacgcgattatcatgcttattacaaaacttcccgaggttatcacgcccgttcgctcaattccacgcaggggtggaatgcgacctccaacctcgcttttttgaatgcacctatccttgcctatgccgcagagattcgcagtgcagtgatggtggtacacggtgagaaggctcattctcgctatatgggagaggacgctttcaagaaattgcaaggcgacaacaaacgattgctcatcgtacccggtgccaatcataccgacctttacgacaagatggagataatcccgttcgacgaaatagcagcattttatcgggagtatttgaagtaagcgtagcgctcgatagatacaatagtaaaagcctgcgatctgttcgcaggcttttcatatttcggttacgcatgtaaatacttcgcctcggcaaaatgcaaataaaatttgcttttgcgctcggcttaatcgtatctttgcacaattgttgagcgtatcgattgtaaaatgcctgtgagctgattttttttgtgattataatttgttgattatgagtgataagtataagatactgttcgtttgcctcggaaatatctgccgctctccggcggccgaaggcatcttccggcaaatggtcgaaaaacgggggctgggggagaagttggaggcggattccgccggaacctatgccggacacaccggcgaacaacccgattcccgcatgcggaatgcggcctatgcccgggggtatctgctgacgcaccgggcccggcaggtgcggttgcgggatttcgaggagttcgatcgcatcgtggcgatggacgataccaattaccataatctttatcgtctggccccttcccgtgaagcgggaaaccgtatttacaggatgtctgaatttttccgggaacatccgaaatggacccatgtgccagacccctactacgaagggcatgaagggttcgagctggtgctcgatatgctcgaggacggctgccgcacgctgctcgacgagttggagaagaggtagctcgaaatcgcagagaacgaaaaagagtgcatttttcaatgcactctttttcgtcgaatcgagtctgtatgccggtgcgatccggaatatttggtccgtcggacgtccgaatcagaagtaaagtccaactcccacctggtaggtgttgcgccaggggcacttcttggcggcgaacaggtaggagaaatcgagctccagatgcatgaaccgcagtcccgcaccgatcgtaccgtagtcgtatccgtggctgtcggcgacgtggtagccgccgcggacagcgatcatctgcatcagcacatactccacgccgatgcccatcccgaaggacttgttctccgaggaagagtagcggtagcccagatcgaccgaagcttcgagcgaatgggaatcccggatcggggcgaagagcgaaccgccgacactgaatttggtgggcaggtcgtaattcgaatcgtcgaacgtgaagccgaagtcggagattttcgcacccgcactcacccaggcgccttcgagcatccggttaagcggaatccgcgcgtatgccgcgacatcgaacccgagggcgttgttcgtgaacagttctccgtacgaggagcggatgtagcgggccgtcaccgacagacccagatagcggccgatccgatagctgtaggccagatccgccgaaacgctgagcggccggaacgcttcgatgccgacgattgggttattattctcgtctttgggaatgaaagggtagtcctcgtcgtccggactgagcttcggctcccggtaaaaacgggtgccgaacgagatcgaatgtttgtggttgaaggagtagaatccgccgaaggccatcaggtcgtagccctttttcacgtcgcgcatccagggcgagtaggagaatcccacctcgaacaggttgtggctgaagagcgacgaggccgcgttctggaatacggagtaagctccgccggtagtcgctaccgaagcgttggccatacccgctgtgcggacatcggggttgatcgtcaggaactcctgagccgatgccgccgctgtgcccgacaggaggattattgcgagaatgaagatctttttcataatttgtaacgtctgtttttagcgtttgactatggtgcgggtaatttgaatgccgttgtaggttacttgtaccagataggttcccgaagcgagccccgatacgtcgagtttgacaggttcctcgttgataagtccaagtgttatgttcattacctccgttcccattgagttacggatacggatcgtgctttctcccgagtagttcggcagtatgttcagtacgtcggtacatgggttggggtaaaagtccattgaaataccggtcggattgtcgccctcgctaacggtataggcgatggtgcgttttgctgtctttgttccgttcacagccagcaattctgccgtatagcttcctgctgcgtattgtgatgcgtcgatagtcagcgtgactacgttaccgtcgatcgactgtgcgatcttgcccgtgggatcgttcaggctccagtccgtgtaatgggcgagggtataggtaagcgtcttgactgcattttcggccagcgagaaggtgtcgctctgacccacagccggtgtgatcgtcggctggtcggaaacgggcggcacctcgcccgaatccagggctgcacccgcatcgacgagcttgccgatttttccggcataggtcccccgaccattgtatattggtccctgatagctgtcgatgtcgcgtgctgtcgagaaaagcttctctttgagctgtttgttcgtgaatcctggtgccccgaattgcgaaacgatcagggccgcaacacccgatacgtgggggcaggccatcgaggtcccctgcatgtagccatacccgagagtctccgagacgtagtcgatcgtgtgggtctccacctctcctctgaaatttgtatagacgaaagtcatcccgttttgcaggtcggtcggaagcgtgctcaggttataaccttcgttataatggataggcctggaaaaatcggctgcgtctcctccgcccggcgcacatatatcgacggtcggaccatagttggtgtaccaagcggcttcataagtgcaggagacggcggccacactgatgcaaggctcgtaagcggccggatatccgggctgtccgctgttttcattacctgccgcgaatatcacgacgccgcccgccataggcccggtctgggtttcgccgtcgggggacatacccgcgtagcggatgaagtagtcgatagcttctttagtggcccgatccgcgcttgaccattggtcgtagctcaaagctccggctgcgtatccccagctgttctggcagattacggcgccgttgtcggcggcatatttgatggcgtcggccgttgcgtttgagttggcatcgtagtgtccgtcggtcggatgaaaaatttcgcacgacatgatcttcgctccgttacctcctcccgtaccgccggcgatgcccgaaatgccgatcccgttgttgcttacggcagcgatcgttcccgccacgtgggtgccgtgaccttcgccccaggtaatgtcgtcgttatctctgtcacagaaattcttaccgattccgctccacatattgcccgccaggtcgggatgggtatattccacaccctcgtccacgacggcgacaatcacatcgctgcggcctgccgtcttttcccacgccgggagcacattgatgtctgcgccggcttgggcgtttgcattgatcgttccgtcgttgtaaagcggccattgtcctccgaaaagcggatcgttgaaagggtagttcgacggagcggccttcggcagggccatcagttttcgccatggagtcccgcttttccggctcattccgccgactttggtaatcctgcgcggaatttcgacatgattcacgccggctatctccccgaagtcttcggcgacctgctcggcggaaccttcgaagcgaatgatataccacagatcgagccctgccttgcgtgttcgctcggcgcagccgttgtcggcgaacaaccgctccattccggtcacgttgtaccgttcgcacagttcatcgaaagagatgttgcccgtcaggaccctgccgctgcgggtgcggattacgttcagcgcttcggccgtttcccggtcgagcttcatgcggatcactccttcgaccttatcggtatcccgtaccggagtactttctgtgtcgggatctttctgacaaccggcgagcagtgccagacaaaaaacgaaaagtagatttttcaacttcataagtgtatgttttttagaaaaaaggagggaagccgactctcgtcaaccttcctctcttgtatgaaatcgcagagagattaacagttcatcgctccacagcaatgaattacctgtccgctcacgtaagaggagaggtcggaggcaaggaacagagccaccttcgccacatcctcgggtgtaccgccgcgacgcagcggaatttgctggtaccagccctgttttacctcttcgggcagggcgttggtcatttcggtaatgatgaagccgggagcaatggcgttggcacggatgccgcgcggtcccatctctttagcgatggacttcgcaagtccgatcataccggctttcgaagccgaatagttgcactgtccggcattgccgctgacacccaccacggacgacatattgataatcgaaccgctgcgctggcgcgccatgatcggcgtaacggcgtgaatgaagttgaaagccgatttcagattgacgttcagcacggcgtcccactgcgcttcgctcatgcgcatcatcaggccgtctttggtgatgcctgcattattgaccagaatgtcgatgcggccgaaatcctgcatgatctgatcgatcactttgtgcgtatcttcaaagttggcggcgttcgaggcgtatcctttggcttttacgcccagggcgttcagctcctcctccgtcttcttgccgttttcgtcgatcgccagatcggtgaacgcgacgttggctccctcttttgcaaactgaatggcgatcgctttgccgatgcccctggctgcgccggttacgacggccacttttccttcgagtaatttcatcttgctgaaatgttttttgatggttaaatttttcgttttatccgtaatattcgatctttctgtcggaaatccggcccgcgtcggctgcccgtatcgcagaggtgcccgttccgatgaaaaatgttccgtttgtcggatgcgttgtatttttctgtcgccaaatatagcaaaaatatttagaaatatttagtttttgtagtttcgtaaaatgttactacctttggaatccgaaaaaaactcttaataaaccatatatcgatcatgaagagagattctcaagtattcgacctcatttctgaggaacggaaccgtcagatgcacggcatcgagttgatcgcgtctgaaaattttgtcagcgacgaggtgatggaggccatgggctccgtactgaccaacaagtatgcggagggttatcctgccgcacgttactacggcggttgtcaggtggtggataaggtcgagaaccttgccatcgaacgtgtttgcaaactgtacggcgccgagtacgccaacgtacagccccactccggcgcacaggccaacatggccgttttcttcgccgtgctgaaacccggcgatacgttcatgggcctcgatctggcgcacggcggccacctttcgcacggttcgccggtgaatatgtcgggtacctatttcaaagccatcggttaccagctcgatccgaagaccgagcgcgtggattacgacgatatggagcgcaaggctctggagcacaaacccaagcttatcgtcggcggtgcttcggcttattcgcgtgagtgggactacaagcgtatgcgcgagatcgcggacaaagtaggcgccatcctgctgatcgacatggctcacacggccggtctgatcgctgccggtctgctcgagaatccggttaagtatgctcacatcgtgacttctaccacccataagaccctgcgcggtccccgtggcggtattatcctgatgggcaaagatttcgagaatccctggggactcaagactccgaagggcgtgaccaagatgatgtcgcagatcctcaattcggccgtattccccggtatccagggcggtccgctggagcacgtgatcgcagccaaggcagtcgctttcggcgaagcgctggatcccagctacaaggagtaccagaagcaggtgcagaagaacgccaaggcgatggccgaggccttcaccaagcgcggttacaagatcgtttccgagggtacggacaaccacctgatgctcgtcgatcttcgcacgaagttccccgaactgaccggtaagctggccgagaagtgcctggttgccgccgacatcaccaccaacaagaacatggtgccgttcgacagtcgttcgccgttccagacttcgggtctgcgtttcggtactccggctatcaccacgcgtggtctgaaggaggacaagatggaggagatcgtagcgctgatcgaccgtgtattgagcgatcccgagaacgaggcgaacatcgccgccgttcgcaaggaggtcaacgctatgatggctaactatccgctcttcgcatggtagcataatatgaagcaggtagtagaatttctcacgctcctgcacgaaaacaacgacaaggcctggtttgactctcacaaggagatgtacaaacgggccttgtcctgtttcgaggtgtttacggcgaagctgatcgacggcatcgccgctttcgatccgtccgtgcgcggacttacggtcaaggactgcacgtggcgcatctaccgcgacacccgcttcagccccgacaagacaccgtacaagacccacatgggggctttcgttgctccccgtggcaagaaaggcggttattcgggctactatttccacgtcgaaccggtgtgggacgaacgctcctggtcgcaggggcatcagctcactacggggctttactgtccgctgccggaagtgctgcgcagcgtgcgggacgagatcctggacaatggcgcggaaattgaagcagccatccgtgaggcgaaaggattcgttctcgacgagtcgaacaaactcaagcgtctgccgaaagggtatgcccccggcagtccgtacgacgaatggctgaaactcaaggatgtctatatcaccgaacgcctcgcgccggagtttatgttggacaaggagttattgaagaacacgctgcacgaatttcgtaagacgaaacatttttcggatattctgaaccgtgctgtgcagttcgcatacgacgaaatgatttgataattattactttatccgacggtcgcagtatcgaaccgaagacgtgcttatctgcggttcatggccttgtccgtaaggcagactctcacccgaatcctcttttcggagggaacttggatcgttacattcccgacaggtgcaccgaaggatatgactacgtttaattttagaaaatatgaaaaaagcaatttacctcttgttggtttcgatgctgttcgttactgcttgtacggagcaggcgccccggattgccaaatatacggatctctatgccgtaaagggtacggacagcctcttcctggatcgctatacggccgtttcggtcgagcaggacgatgcccggccctgtctggtcttcgttttcggcggcggcttcatcgctggggagcgcgatgcggagcggtaccttccgttctttcattacatggttaatcaggggtacgacgtggtatcgatcgactatcgtcttggtctgaagcaggtcgtcgcttcgggggacctctcgcccgaaaatatgatgctcggtatggcccggacgatctcgatggctgtcgaggatctttacgacgctaccgcttttatcgtggacaaggcagacgagtggggtatcgactcctcgcagatcgtggcctgcgggtcgagtgcgggagcgatcaccgtgttgcacggcgaatacgccctctgcaacgcttcgccgctggtgcaacacctgcctgtcggcttccgctacgcgggtatcgtttctttcgccggggcgatcttcgaaatgggcgaggagctccgctgggcatcgcagcctgcgccgatgatgctttttcacggcgatgcggatgcgaacgtaccgtataatgtgattcgcgagagcggcgtcggtttcttcggctcgaagtacatcgccggacagctccgcgcgatgaactccccgtattatttctattcggtcgagaacgcctcacacgtcatcgccacggcgccgatggacggcaaccgggatgcgatcgatgctttcctctcgaaactcgtcgtggataaggaaccgctgatgatcgaaaccgacgaaacgacgatcggcgcccctgaagtccgcaagaacttcacgttggccgaatacatcgcatcgaatttcctgtaaaaaggatgcggaagtgtgtgcttacggttcgaatcggcctcgatttatgccggctggacaatgatgcgatgtgtccgatgagtatgctcggtgatggttcggcgacggattgctgtcgagaatattccgtatggagtttccgctgctgttcagattgcgggtagagtcgggaatagatcggcgaacgcaccttccgaaatcatcaataatataaaatcagccgcaacctaaaggttgcggctgattcttgttgtatcggtcttgtcattactccaccgttaccgacttggccaggttgcggggctggtccacgtcgcgccctttattgacagcgatatgatacgccagcaactgcaacggcaccgataccacgatcggcatcaggcactccgccacgacgggcacttcgataaagtagtcggagctcttgcgtacctgctcgtcgcccttggcgatcacggtgataaccttgccgccccgggccttgatctcctcgatgttgctggcggtcttttcgtaggtgtgatccggcgtcgcgatggcgatggtcggcatctcggcgtcgatcagggcgatcggaccgtgtttcatttcggcggcagggtagccctctgcgtggatgtaggagatctccttgagtttgagcgcaccttccagcgccgtggggtagttgtacccgcgtcccaggtagatgaagttgtgcgcgtaggtgaagattttcgagaagtcggcgatccggtcgttcaggcggagcacctcttccaacacggcgggcagatcgagcagatgcttggcgatcttgcgcgagcactcctggtcgatcgtacccttgacacgggcgatcatcagcgccagcatcgtaagtaccgttacctgtcccgtgaaggctttggtcgaagccacgccgatctcaggccctacgtggatgtaagtgccggaatcggtagcccgggcgatcgacgagccgatcacgttgcagatgccatagacgaacgcaccgttctgcttggccagctcgatagcggccagcgtgtcggccgtttcgcccgactgcgatacggcgatcacgatgtcgtcgggataaatcaccggattgcggtaacggaactccgaagcgtattccacttcgaccggaatgcggcagaaatcctcgatcaggtactccccgatgagcgatgcgtgccacgaggtgccgcaagccacgaagatgatgcgccgggcgttgagaaaccgctctcggttgtccatgatgcccgacaggatcacgtcgtacgtctcggggttgatccggccccgaatgcagtccacgatggtcttgggctgctcgaagatctccttgagcatgaagtgcggatagccgcccttttcgagctgggagatgctgagctgcaacttcttgatgtcgatcttgctctcctggttgtcgagcgttacgatcttcagcgggtggttgcgatccatgaccactacctcgccgtcattgacatagacgatcttgtccgtatattccacgatcgacgccgcgtccgatgccaggaaaaactccttgtcgccgataccgatgaccatcgggctgctgcggcgtgccgcgatgatttgatcttggttgcccttctccactacggcgatagcgtatgcgccgatcacctgcttcaatgcttgctggacggcctccagcaacgtgcagttgttcgacgtacggatgtattcgatcagattgaccagtacctccgtgtcggtgtcgctcttgaacgtgtaaccgttttcgatcagcgcctctttcaacacccggtaattttcgatgataccattgtggatcagggcgatattgcccgaatcggagtagtggggatgggcgttgatgtcgttcggttcgccgtgtgtcgcccaacgggtgtgggcgatgccgatcgttccgtccagatccttggattcgacgaaatgttccaaatcggcgactttgcccttgcttttgaacacgttcagaactccttcccgattgaccagtgcgagtcctgcgctgtcgtaaccgcgatattccaagcggtgaagtccttttatcagaatggggtaagcctgctgtttacccacgtaacctacaattccacacataatgtattctttttgcgatttgcaaagatagtgaaagccgggagaaaacgggaatttgttctcaattttccaaggcgcatcctatctaagactatgtcaaagatagtgaaagggaagagcaatcgtgcgaacttgcacgcaaagattgctgaaccgaatcctatcttctataaaaatagtgcaaggtgagtgagagccaaacttaactttctgttttcctactccttgcatcgtagagttcacaagtgccctccgcgtatgcttcgagcgtgggttgtttgaactcgttcgaacctttccatcttctttttttgtaaagatacgaatgagccgggcgcaaaagcaaattttatttgcatttgccgaggcgaagtatctacaacgaaatcaaagatcctatctttttgaacaaacgtatccgtaatgtacgaaaaacgggatatatccttcggatattgtcccgtttttgaaatcgtattgcctgtttacttttcagcgaaatatttataaaacagcggaatcgtttcgacccccttgtagaactggtcgagtccgtagctctcgttgggcgaatggatggcgtcctccgccaggccgaatccgatcaggagggacttgattcccaggatattttcgaatccgctgatgatcggaatcgagccgcccgaatagaacggcagtggtttcttgccgaacgtgtcggcgatggccttttccgccgctttgtaagccggcatatcggtcggagccacgtagggcataccgccgtgcaggaacttgaccttcaccttgacgctcttgggagcgatcgccttgaaatgtttctcgaagagcttggcgatctttttgaaatcctgtccgggaaccagacgcatcgagattttggccgaagccttcgacgggatcaccgtcttggtcccctcctcgatatagccgccccaaatgccgttcacgtcgagcgagggacggatacccgtgcgttcgatggtcgtaaagcccgcttcgccctcgacatcgccgatttcgagcgctttcttgtattctgtaaggttgaacggagccttgttgaaggctttgcgctcggcggccgtcagctcgcgcacgtcgtcgtagaagcccggaatcgtcacgtgtccgttttcatcgatgagcgaagccaccatgcgggccaggacattggccggattggccaccgcacctccgaacaggccggagtgcaggtccttgttggggcctgtcacttcgacctccatataagtcagaccgcgcagaccgcaggtgatcgaaggtatctgcatcgagatcatcgatgtatcggaaaccagaatgatgtctgccttgagcatcttcttgttgtcggcgcagaacttgtagaggctgggcgacccgatctcttcctcgccttcgagcaggaatttcacattgcagggcaggctgtcggtcgcgcacatcgcttcgaacgccttggcgtgcatgaaaagctggcctttgtcgtcgtccgcaccccggcaccagatgcgtccgtccttcacgaccggttcgaacggcgaggtgcgccattcgtccaccggatcgaccggcatcacgtcgtagtggccgtacaccaatacggtcttggctttgggatcgacgattcgttcggcgaaaacaaccggattgccttccgtgggaagtacctcggcatggtcggcaccggccttcatcagcgaagcggccagccattcggcgcatcgggtcatgtcgggtttatgatcggattgcgcgctgatcgaagggatgcgcaacagctcgaataattcgttgagaaaacggtctttgttcttctctatgtaactctttactttatccatggaatttgattatttggtgagtacgtattggtctgcgagttctccggtgataggctgcttctttgcattaagacggcgcaggcggttttcctccaccttgtagtactcgggggcgggaagccctatgccgactttggcgcgcagcgtcagcaggttgccttttaccgtatagtttcctgtctgttgaatcggctcttcagaacgatccatatagctggaattcatcgtataggtgttgtcgttgtgaagcgtgagttcaatctcgatgcccgggcagtccgcagcaggaaaaacccctttgtaagttccctggtagtcgagtgcgttttcggcattgtgcatgtcgggtaccccggcagtcgtcttttggcgggagtttcctccgcaggctgtcagcataattgcggcagcgagtatcaataaaatgtttttcatcgatttatatattacaaatttgttttatttccgcaatgatccgccgggccagcgcatcggcctccgccatcgttttcgcttcggtatatacgcggatgatcggttccgtattcgatttgcgcaagtgtacccaattctccgggaaatcgattttaacaccgtccgcatcgttcaccttttcattggcataacgggatttcatctcacgcaatactttatccacgtcgatggccggtgtcagctcgatcttgttcttcgaggcgaaataggccggataagtcttgcgcagctcggtcatggtcatacctttttcggccagataggtcaggaaaagcgcggcgccgaccagtgcgtcgcggccgtagtgcagttcggggtagatgactccgccgttgccctcgccgccgatgacggccccgacctctttcatcttggcgactacattgacttctcctaccgccgatgcaaaatattctcctccgtgcatttgcgttacatcgcttaaagctctcgaagagctcagattcgacaccgtattgccggttttgcgggagaggatatagtccgccacggcgaccagcgtatattcctcgacaaacatcgagccgtcttcgctgacgaaggccagccgatccacatcgggatcgaccactacgcccagatcggccttttcgcggacgatcgccttcgatatttcggtcaggttctcgggcagcggctccgggttatgggcgaactctccggtcggttcgcagttgagctccacgacttcacatcccaactcccgcaacagcttgggtatgacgatgccgccgacggagttcaccgcatccacgatcaccttgaagtgccgtttccgcacggcttccgcatcgaccagcggcagggccaatacccgacggatatgctcgtcgttgtaagattcccgcgaaacgaccttgccgatatggtccacatccgggaaaacgaagttctcgtcttcggccagcgccagcacccgcttgccctcggcgtcgctcagaaattctccctcggcattcaggagcttcagggcgttccattggcgggggttgtgcgatgcggtgatgatgatgccgccgtcggcccggtgcgccgtaacggccagttcggttcccggcgtagtgcagagtccgatgttcactacgtccgcgccgcagcccagcagcgtgccttcgatgatgtcgccgaccatttcgcccgaaatacgggcgtcgcggcccacgacgattttgagccttttcccgggtgcggattcggcgatgaaacgcacgtaagcggtggtgaatttaacgatatcgagcggggtgaggttctccgtcgcagggccgccgatcgttccccggatgccggaaatggatttgatgagagtcatgtcgcaaatatctcttttagtccgccgagcgggatacaatatatttatggaaaatttatcgtggcgtattttttgaaattcgaggtaaatgtagtacttttatgccaattatgaaaatataaaaaccgacactatgagaaccataccttcttccgaattgataatcaacgacgacggatcgattttccacctgcacctcaagccggagcagcttgccgacatcgtcatcctcgtgggggatcccggccgcgtagccatggtcgcttcctttttcgatacgcaggagtacagcgtttccaaccgcgaattcaataccgtgacgggtacctacaaaggcaagcggatgaccgtgctttcgaccggtatcggcatcggcaacatcgacatttcggttacggagctcgatgcgctggccaacgtggatttcgccacgcggcaggagaaggcgcagaagcggcagctcacgctggtccgtttgggtacttcgggcgccattcagcccgacatcaaagtggggcagttcgtcttcgcccgcacttcggtcggcttcgacggtctgttgaattactacaaggggcgcaacgaggtttgcgacctggagatcgagaaggcttttatgaaacatacgggttggagcgatttgcttccgaagccctatttcatcgatgcggatccttcgctggccgagcttttccgcgacgtaaccatcgaaggcatcaccatcgccgcccccggcttctatgcgccgcagggacgctgggtgcgtctcgaaccggccgacatccatctgaacgagaagatcgagtcgttcgactatcacggacgccgggtcaccaatttcgagatggaaagttctgctttggccgggctggccgctctcatgggccacaaagccgccacgatctgtacgatcatcgcccagcggatcgcgctggacgcctgcacggattataaacctttcgtcagaaagatgatccagacggcgctcgataaactggcgacgttgtaaccgaccggatttcgggaatggttccgggcagcgacgcgaacccggagccgagttcgatgaatacccgggcaccgcagcgggataggatggtttcccgattctttcaggtagtaaaaacgaaataggaaacttcagacgcgggggctgcctcggaatacccaaccaataaacaaaaggcttcaaaagactaacagaaaataaattacattaaaacctatgaaattttccgtatcaagttctgcattgctctctctcctggccacgaccggcaaagtaatcagcaataaaaatacattgcccatcctggattatttcctgatggagctcaagggggatgagctgcgggtgactacttccgatctggaaaccacgctcgtgggctcgattcgcgtggacggcgtcgaaagcggaggcaccatcgcagctccggccaaactgatgctcgattcgctgaaggagttcgccgaaatgcctctgacgatcgaagtgaacgatcagaactgggagatccgtttgagttggaaaagcggttcgctctcgattcccggcgccagcgccgtgagctatccggcgatcccggctctttcggccgattgcaaggagttgacgctcgatgtggacgtgctggtgaacggcatcaacaaaacgattttcgccacggccgacgacgagctgcgtcccgtgatgaacggcgtctatatcaacctggccccttcgatgcttacattcgtgggtaccgacgcccacaagctggtgaaatacgaggtggaaaccgctaatgaagtggcttcgtcgttcatcctgcccaagaagccggccaacctgctcaaatcggtgctgctcaaggaggaagacgcgatcaaggtgagcttcgattcgaaaaacgccatgttccagctcaagaaccatacgctggtgtgccgcctgatcgaaggcaattacccgaattacaatgcggtgattccgaccgcgaatcccaataaggtactcgtcgatcgtatcgaactggtcaatggcatcaagcgtgtggccgtctgctcgaaccccacgaccaacctgatccgcatggacatcgccgacaaccggatcaaccttacggcgcaggacatcgatttctcggtatcggccaacgaaacgatcagttgcagctacgaaggccagaatatcacgatcggtttcaaatcgacgttcctggtggaaatcctctccaacatcgatacgccgaccatcgtcatcgaattggccgattcgactcgtgccggcgtattcaaacccgtctatgacgacaagcagtcgagcgcgacgctcatgctgcttatgccgatgatgattaacgcataacccggatggagctcaacctcaagcggccgatcattttcttcgatttggaaacgaccggcatcgacatcgcacgggaccgcatcgtcgaaatttcgatggtcaaggttatgcccgacggcgaggagatcgtccgtacgcggcggatcaatccgggaatgccgattccagccgaagctacggccattcacggcattacggacgaagatgtgaaggattgcccactttttccgcaaattgccaagtcgttggcccagtttatcgagggatgcgacttcggcggtttcaattcgaaccgcttcgatctgccgatgctggtcgaggagttcatgcgggccggtgtggacgtggatttccgcaaacgtaaattcatcgacgtgcagaatatctttcacaaaatggagcagcggacgctggtggcggcctataagttctattgcggcaaggatctcgcggatgcccattcggccgaggccgatacgttggcgacatacgaggtgctgaaagcccagttggaccgttacggggagttgcagaacgatgtcgcggctctggctgaattttccacgcgggcggaatccgccgacttcgcaggacgcatcctctataacgaaaaaggggaagaggtcttcggattcggcaaatataagggccgttcggtcgcggaggttttccgcgtcgagccgagctattactcctggatgatgaacggcgatttcccgctctataccaagaaaattattaccgaaatccgctgccgggagaaaaacgagaaacaatagactatgctgaaggaactgtgttgtaccgcgatgttgctgacggccggggcgaacctttatgcccaggagccgcagtctatcgagaaatcgcagacgatcgtttatatcaacggtgcaaaatactatgtccacaacgtccggcacggggaaacactctattcgctggccaaaacctatggagtggcggaacaggtgatcgccgccgaaaatccgcagctcgctcaagggctcaaagccgaccagagccttaaaatcccggtcgtggaaacgggtgtcgtcgtacaggagcagctttctcctaaaaagctgaagaagaccttcgatcagcacacggtgcagaagggcgaaaccctttatgggatttcgaggcgctatgcgatctcggtcgaaaccatcatggaggacaatcccggcctggatccgattcacctgaaaccgggttcggtcattttgattcgcaaaaaggcggtcggcaagactgacgaagcggaaaacacggcggcatgggagcagtacaaggatcgtctgaacctggttgccgaggagggttatatgtaccacatcgtcgctcccggggagacgatgtacgcgctgtcccgtcgcttcggtacgacggttgaaaatctggagcggctgaacggtatttcagcgcaagacctccgttcgggaagtatgctgaaagtccccggcgatgcaaagtccgcgaccgagccggcgccggaagagcgattcggacagcccgagccaacggagagcgataccttgacgacggtcgaaccccaggtgaaagaggtggattttctggcattgagcagcggagagccgcttcgtgtggcgctgttgttgccgatgaccgatggcgacaaacagaatccgaattatctcgatttctaccagggatttctcctggggcttgaaaagataaagacccaatacggatactccgttcgggtcgatctgttcaatacccggcaggaaagcgaccgactccgtacgattgtggacgacgccgattttcgggcggcccgcttgatcgtaggcccggtttacgaagaggaacttcctgccgtaatcgggtatgccgaggagtatgccgtgccggtcgtatcgcctctggccgatgtcaagaacgtcgatagcgatgttttgtttcagatggcaccgccccagatgcggaaatatgccaaaatcgaagaactgactcagggtgagcacaaacaggttatcttgatctacggagagaagaacgaccgggagttcgaacgggaaattctggctgcactgcagggtgtaccttacgcgcggcataattatcgttacgctgtcaaggagggcgaccaggggctttcgtcgctgctggccaatggcaaggacaacctgctgattgttttgagcgacagcgggctcgaagtggaccgtattctggcagccatcgcttcggccaataccaacctcgtagcccgcggcaagacgcctccccgtttcacgatcgtcggcaattcgcgttggaaccgcttcgggaacctcgatcgggcgctctacttcaaggaccggctcgtgctcttctcgacttatcacgccaaacgcgatgccgaggtaatcaagactttcgacagcgactacatcaaagctttcggggcgttgccgtcgctctactcttaccggggttacgatgcggcgatgatcttcgttccggcgatgtattccgacatccagtacgatatggagggacgccgctacacgccgctgcaaacctcttatacgttccagcaaatgcccggagggtccaaccatgtcaaccaaaactggatgcgtgtgagctaccgaccggacttcaccattaccgtagattgaaatggctttaatacccaacggaattcccgaaaaaacgatcgagcggctcagcgagtatcgccgtacgctgctcgcctgccatagggagggcattacccacattttttcgcacgtgctggccgggattcacggcattacggctgtgcaggtgcgtcgggatctgatgttgatcgggttctcgagcgataccaagaaaggctacgacgtaaaggtgttgatcgattttatcagcaacatcctcgacagcgaaagcccggtgaacatcgccgtaatcggtatgggtcacctggggcaggccatcaccaaatatttcaacgggaagagcctgaagctgcggatcacggtcgcgttcgacgtcgatcccgcaaaagtggatactgcgatcgacaacattccgtgctaccacatggagtgtttcgagaaggtcgtccaggagaacgacatctcgatcgtcatcgtatcttcgccgaccaaagtcgcccccgaactggtcgtgccgatcatcaacgccggcatcaagggcgtactcaactttacctcgacacgcctgaatttcccgcaaggtatctacgtggagaattacgatattacgactcttctggaaaaggttgcttactgcgtcaaggaatccgaagagaataacgacaataattaaggtgtcgatgcgagtattccacggcttcgaaaatctgccttcgttccgttcgccggcggctaccgtcggatcgtacgacggagttcatagcggacaccgggttttgctcgaccggattcgccgggaggcggccgctgtcgggggagaaagtatcgtgctgaccttcgacccgcatccccgcgtgacgctcggtacacaggagcggctgcggctgctgacttcgctcgaagagaagatatacctgctcgaccggttcggaatcgacaatctgatcgtgattccgttcgaccgggccttcagccggattccttccgagagtttcgtaaaggactatctgatcgggaaggtgggggtgaagaatctggtcgtcggtttcaaccaccgcttcggccacgacaaggagggagattaccggctgctcaacggattgcatgacgagttcggcttccgtgtgacggagatcgagaaacaggatgtcgatgccgagaaggtgagttcgacggtcattcgtcgtctgatcgagcggggagagatgaataaagctgcccggatgctgtcgcatccgtatctgttggcaggcgatgtggactgcgcaggacatatcgcctcgggagaggctctcaagctgcttccgcctccgggtgaatatcccgtgcggatcgaaggtaggcccggtgtgcttcggataaccgccaaaggtactccggaattattgaggacggcgggaaaaatgccgtcgggccatatactaatcgagttttaacgccatgctgacaagagatttcaaattcagagtctggtataaggataccgatcagatgggtatcgtacaccattcgaattacatctgctattacgaagcggcccgttcggagctgctccgcagtttcggctcttcgtatgccgatatggaggagaaggacggcgtgatgatgccgattctcgaggtacactccaagtacctgcgtccggctcattacgacgaattgatcacggttcgaatttccctccgggagttgccgaaagcgcgtattacgttcgaatacgaaatttacaacgaagcgggcgagctgctcaatacgggttctacggttctgggtttcatccaccgcgatacgcggcgtccctgccgggctccgaaaggatttatggagctgttggaaaaaaacctgtaattcacgctgttttttacgaatcgccggttgatcgtatcgatttttcccaagaggaagatatttcggattttcgtcgatggaggaatccggatgagagttccgtacgattttatccgatataaaatagcggcggctccttttcggggccgccgcttcgatatacggtaatttactgctatttctcgatcagcgaaatactgcgttggatgaactccgtcaggtttttgcccttgagcaatccgttggagagcaatgccaggtcgatgatctgtttgacgagcttgttctctccgccaatttcgcgcagacgcgtatcgcgctcgtcgcgcagggtgacgatcttcttcgaaagctcctcgcgtgtcgatttctcctcgggcgtgagttcctcctctttcttgcctttgaccacttcgtcgaaacggcgctcttcggcgaccgcagcatcgatctttttggtgatggtcttcagcttgtcgccgtagctcttctccacatcggccaggatgtcgatcacgatggggttgttgccattgacggcgatcgtgaagttatcgggcatctggctgtagaattggctcatacctccgccgctgatggctgccatctccttcatgcgccgcatgaattcgttctgcgtaatcaccacgggcgcagcatcggccgccatcgcttcgaacgaaatgttgtagtggatcttctcgtccttgggcatctggctttcgaatacgggacgcatgatctcctgctgggcctcgctcagggacatcttgagcgtttcgtctttctggatgagcttgtcgatcacgtcgctgtccacgcgcacgaagcgggcgtccttgtgtttcgactcgtaccaattgacatagtggttgtcgagttgtccgtccataaccagcacgtcatagcctttggccttggccgattcgaggaacgaatttttctctacgggatcgtccacatagaggaaaacgaccgtaccgttcttgtcggtctggttacctttgacgacctccttgtactcttcggcggtgaaatacttgccctcggtcgtcttccacagcatgaaactctctgccttctcggcgaacttttcgtcggtgataatgccgtattcgatgaagatcttcagatcgtcccatttctgttcgtagtccgcacgcatcgtcgtgaagagctcctgcaagcgatcggccaccttgcgggtgatgtagttcgaaatcttcttgacattcgaatcgctctgcaggtagctgcgcgatacgttcagcggaatatccggcgagtcgatcacgccgtgcaacagggtgaggtattccggtacgatcccctcgacctggtcggtcacatacacctgattggagtagagctggatcttgtttttctgaatttcgaagttgttccgaatcttcgggaagtagaggatacccgtcaggtggaacggataatcgatattcagatgaatcgagaagagcggctcttcacctatgggatagagttcgtggtagaactccttgtattgctcggcggtgatctcggtgggttttacggtccacagcggggcgatgttgttgatgatgttgtccttgttggtatcgacgtatttgccgtctttccactccttcaccttgccgaaagcgatgggaacgggcaggaagcggcagtacttgcgcagcagctcttcgaccttcgaatcttcgccgtattcgagcgtatcggccgaaaggtgcagtacgatcgtggttccccggtcgcgctgttcggccgtttcctccatttcgtattcgggcgatccttcgcaactccagtgtaccgtcttggcgccctccttgtaggagcgggtgaaaatctccactttgtcggcgaccatgaaagcggagtagaagcccagtccgaagtggccgatgatcgcctggttcttgtatttttccataaactcctcggcactcgagaaagcgatctggttgatgtaacgctccacttcgtcggccgtcattccgataccgcggtcggttaccgtcagagtcttggcctccttgtccgccgaaacgcggatcgtcaggtcgcccaattcgccctttacgtcgcccatcgaagagagagccttgagtttctgcgtggcatccacggagttggagatcagctcacgcaggaagatttcgtggtccgaatagaggaactttttgataacggggaagatattctcggtggtaaccccgatttttccgtttttcatcgtattatggtatttttttaattgaattatttatcgttttttgatacagcggactatggttgccgctgccgaagagagccattctctcgcatggattcaacaaacggtgtgccacctcctccgatatgacattctgtcatacgcttcctgacaaaataaaggcggcagggaatcctccccgccgccgtacgtgtttcgtcggctcgtctgccgaaagtattagagcaatttttcgagtttctttaccaggtcggctttcgtgcaggcacccacctgtttgtccacgacctgtccgcccttgatgaacacgatcgtcggaatgttgcggaccatgaacttgcccacgatgtcgtcgttgttatccacgtcgcacttgccgatgaccgcacggccttcgtattcgccggccagctcgtcgatgatcgggctgatcatgcggcagggaccgcaccattccgcccaaaagtcgatgactaccggaagctgggatgcggagatctcctcgaaattgtcttttgtgattgctaatgccataattttttagatgttttgattataaattaaacgatagtatatttgatttcattgtcctcgaggaacgaaacgaggttcgacgtgaggctcaccttgtgccgtttggagaacatattcacgcttacctgcgcatctcggtcatagacattcacccgcagcgtggtcgatccttcggactctttgatgcggtgcgtcagctcctcgatcatttcgcgcgtgatatcctcgatcgccagctggatatacatctccttgatcatcgtgtcgcgcatttcggagagctgtaccatcgaagtaatcttgaattccagctccttgtcgttgtagggcttgggttggaccttgccccggatgaagaggaaatagtcgttgaacaggtatttgcggaaattttcgtagtccttgctgaaaagcgcaaattcgtgcgtgccgttgtagtcttcaagcgtgaattttccccagggtttgcccgtcttggtaacgaggttctgcgtggcgatcaccatccccgccacggcaatctcctgtccgcgcagggattccaggttgtcaagatccgaaagctgcgtcttacacatattgcggataatcaccgcataatcgtccagcgggtgagccgagaggtagagtccgatcatctcgcgctccttgcccagcgtttcgagcgtgctccagtcctgacaggccggaatcacgggatgctgaatatccacgaccccttcgccgcctccgaaaaggctttgctgggcattgtctttctcgctttggaaccgctgcccgtagcgtaccagctgctcgatgaaggtcgtcgaactggagtcgcgcagatcggtgccgaagaatttgcagcggtggaacccggagatcgagtcgaagccgcccgcataggcgatgttttcgaggcatttgcggtttacggccgtataattcacccgttcgaagaaatcgtatatgtccttgaatttgccgttcttgttccgctccgcgacgatgctctccacagccgcctcgccgacgcctttcaccgcagccaggccgaaccgcacgtcgccctccttgttcgaggagaagttgttgagcgattcgttgatatcgggcccgagcacccggatacccatgcgcttgcactcgttcatgtagagcgtaatctgcttgatgtccgaaaggttgcggctgagcagcgcggccatgaattcggaagggtagtgcgccttcagatagcccgtctgataggcgatgtaagcgtagcaggtcgagtgcgacttgttgaaagcatacgatgcgaacgcttcccagtcgccccagatcttttcgcaaattttggcgtcgtgcccccgcttgctgcatccttcgatgaacttgggcttcatcttgtccagcaccgcacgttgtttcttacccatcgctttgcggagcgtatcggcttcgccgccggtaaacccggcaagcttctgcgagagcagcatgacctgttcctgataaaccgtaatgccgtaggtgtcgctcagatattcctccatatcggcgatgtcgtacgtcaccggctccagtccgtgcttacgggcgatgaagttgggaatgtactccatcggtcccgggcggtagagggcgttcatggcgatcaggtcctcgaaacggttgggtttcagattgcgcagatgttttttcataccgggggactcgaactggaacaggccggtcgtatcgccgcggctgaaaacctcgtaggtcggggcgtcgtccagcggaatgttgtcgatatctacgtcgatgccgtgcacgtttttgacgttggttacggcatccttgatgatcgagagggtgcgcagtcccaggaagtccattttgatcaggccgacgctctcgacctctttgccctcgaactccacgacgttcagatcggcgtccttggcgatagccatcggagcgaaattctccaggtcgtcctgcccgatgattacaccgcaggcatgcacaccggtctgccgaatcgagccttcgagcttttcggcgtatttgagcgtattgcggatcaactggttcggggattcccgttcggcggccagttccggcgactccttgtagcagaagtcgaaaggcgtttctccggccttcttgtcgggcgtaaccttgtcgggtaccagtttggccagccggtcgctctccgagagggccagcttctgcacgcgggccacgtcgcggatcgccagcttgggcgccatcgtaccgaacgtcacgatctgggccacgcgtttctgcccgtacttgtgcacgcagtaatgcagcacgtcgtcgcggccgtcctcgtcgaaatcgacatcgacatccggcagggagatacgctcgggattcaggaaacgctcgaacagcaggtcgtatttcagcggatctatgttggtaattttcagacagtaggccacgaccgatccggctgccgaaccacggcccggtccgaccgacacgcccatttcgcgagccgcgcggatatagtcccatacgatgaggaagtaacccgggaatcccatccattcgatcgtactcaattcgtaccggatgcgtttctcgacctcttcgctcaattcggcgccatagcgcaggtgggctcctttgtaggtcaggtctttcaggtagcagaactgtttggccgtcatcagcttttcgctgcgctccttgctctcctccgcccaggcatcgagttcttcgacgctgtggcaggcatcgattcgcgccagctcttcctgatcttcgatcttcttgacgagcgattcgcgcaactcctcgaaaggcatgtggaactccggcggcggagggaagttgggcatcagaggcgcatgggtgagtttgtactcctcgaccttgtcggcgatctcgagcgtggtggcgagtgcttcgggatggtcggggaagagctgcgccatctcttcgggcgatttcagatactcctggaacgtatagcgcatccgattgggatcgtccaggtcgcggccggtattgaggcagatcagatgatcgtgcgccacggcgtcttcggccagaatgaaatgcacgtcgttcgagcagatgtatttgactccgcatttggccgacagctccagcagggccttattgaccagtaactgattctcgtacacgtcggcgtccttgcgcggatcgcccgacggatggagctgcaactccaggtaatagtcgtccccgaagacgcttttgaaccagcgcacgacctgttcagcctcctccatgtcgttgcgcatgatggcctggggaacttcgccgcccagacatgccgagcagcagatcaatccctcgtggtattgttccagcagtttcttgtcgatacggggcttgtaatagaatccttcggtaaaggagtaggatacgatcttgcagagattgtggtaacccgttaggtttttggccagcagaatcaggtgatcgcccgccttctcgtccttgtccttttcgaagcggttgcgcacgacgtaggtttcacaccccaaaataggtttgatgcccgcatcggtggcgacgtcgtggaagttcttgacgccgtacatattgccgtggtcggtgatggccagagccttcataccgagggctttggctcgtttgatgagcggcgatatggccgctgcgccgtccaagatggaatattgcgtatgtacgtgtaaatggacgaaatccggcataattcgaaaatttatggttttgggccatcctttgcgaaggtacgaaaaagtcgcgggcagaagcaaatttatctgcgtcttgccgatgcttaaggcgaagtcaaaggtaatgaaaaaatatgaaagaatttccgtatttccaagtaaaaattgcccgaacgattctacgttgttgaaaatgacgggataggaaatatgtggcaaaaatcttgcagcattccgaaaaaaaacgtatcttgttgatagccggatttatccggtcctgcatcgcccgttttcgccgggtacgaacggagttcggaaccgggagcacggaagttcgaagaaccgaaaaacgacgggatgcaaagatttaataaaaaatgtggacctcgttggaaatacggtactccgagtacccgcattttaggaaaggtctgaattttaatgcggccagaggatgcgaataaatgtccttcggattcgatgctgcgattgtcaaactgttacatcgaaagatataatggccgaataaatatatcacctaaacagcgatgattatgaaagatgaaaaattagtcgtgttgagagagtggaactctgtcaccgaagccgaaatggccaaatcgattctggacggagccggaattttttcgacgatccgcaacgaatatatgtcggcgatctatcccatcggcacgatgccggcacagctcgtggtcaaggaggaagatgcgaagcgggctgccgaattgctcgacaaaatgccgtaatttattattttgcagctattcaaggagttcgggaagctcttaaagaagcccccgaattccttatgaacggctcggaacaacctctgttgcttgcgactttcgaacggttcggagaaggggcgaaactgcgtaccgaaaacgtcgattcatagcttcaggtccggagaacgaagtcgtcggaaatgaaaccggcttcgataagatcggtcgagccgtgtcggaggatcccttatcggttccatatggcccaggcagcttccgcctgccctacgagcatgtcgagtccgttgcacgtgtgtgctccccgttgcgctccgtattgcagaaacagcgtttcggccgggttgtagatcaggtcgaaaagatagtgggagggcgtgacgaaagcgtacggaatgcggggcgcctcttcgacattcggatgcatcccgactggggaggcattgataatgagccgatgcgaaccgattacttcatccgatacttcgtcgtacgtataatttcccgttgccggattccgcgatactagatcgaacggaatttccatctgtgccaatacatattgcacggcttgcgacgccccgcccgtgcccagtaccaatgcccgttcgggacgctccccgccgagaaatgtttcgagggaggcgcgaagtcccgtcacatccgtattataacccgtcagacgtctgccttcacagcgcacgcaattgacggccccgatcatccgggtttccggcgaaagatcgtccagatagggtatgatctgttgtttatagggaatcgtgacattgaatccccgcagttcgggctgcgcttccagcaaagcgggcaactcctcgatcgttttcaattcgtaaaggtcgtaccggcaatccgcaatgccttcgcgtgcgaatttatcggcgaaataccgggctgaaaacgagtgtcccagcgggtagcctatcagaccgtagcgtttcataaggttttagttttggggagcggagattttttgagcgacccgcttgccgatgaattcgatgacatagatcagaagaaatcctgccagcgccagtgctacggcctgccacaagtgggcatcggtctgaccgatcgcctcgaaatgtcccggtgtaatgttttgttccaccaacgggtgaacggcaccctgggcatccgtataagtttccacgacctctttccagggccagactttattgagcgatccgaccatgaaacccatgagcagggagatcgtcaggtcgtgatgcttgcgcagcagccacgaaagcaggtgcgaaaaactgatgataccggcgacggctccgactgcgaaaagcagcaggacacccagccggaattcgctgacagcctgtaaaatgtattggtattttcccagcagcagcaggatgaaggcgcctgaaattcccggaagaatcatcgcgcagatggcaacagctcccgaaagcatgataaaccaccagtcgttgggcgtttgcgtcggggaggcgatcgtgatccagaatgccagcgcggtgccgacaagcagtcccagtagcgaagtgaggttccacttccgaatatcccgggcgacgaaagccgccgaagcgacgatcagtccgaaaaagaaggaccagatttcgatcgggtgatgcgccagcaggtaagtcatcaaccgtgccagcgaaaagatggcgataccgatacccagcagtacggagaagaggaaactgccgttgatgtggcgccagaatttcctgaattcgaaccggccgagcaatttcaacgcagtcggattaaaacttttgatcgactcgatcagttcgctgtaaattcccgaaataaaggcgatcgtcccgcccgatactcccgggacaacatccgccattcccattgcgcagcctttcagcgccaacagcacgtatctgaacataatccgctctaataaaaagttaggcaattcatctttcaatgtaccttttgacaattccgagaggtgtctattcgctgttcccggttgtatcggtaatgctcctgcccacagatcccttcccggaaaggacttaaggcgctttactcccaaagaggtacactaaagtatataatcacgaaaagttatctcgttcgtcgaaaacacgacgtttcgcaaaaacggcattataataacatcgcataggtattgccgtttccggcgatgttttgcttgtgcaaagatagtatatgcgggaaacatcgcaagattttttcgggataaaaccctgaaaaaatccatcccgaacgaagatttaataattcgttaataataccgttcgaggattccgcctccgacgacccgttcccctcggtacaaaacgacgggctgcccggcggccggggcccacgcgggatcctccagttcgatccgaatccccgaagcggcagggaagaccgctgcgtatccctcggggttgcggccgatgccccggatcaccgcacggatatcgcgggcaccgaatacctcgtcgctctctatcaggcgacattccccgacttccagcgtacgatgcaacaacagcttctcttctccggctacgatccggtttgccgccgtgtcgatagcgaccaccgcccagcccggcggcaggtcgaggccctttttctggccgatggtgtagagggccgccccgtcgtgcgtgccgagccgatgtccggcagagtcgatgatggggccgggccggagcgcttccgttttatcccggcttcgcaggaagtcgcggcacgggcgtccctcgagaaaacagacgcccatactctcccgacggtcggcgagttcttcgacgatatttcgtttgatgaccgttcccatcggagtcagcacccgatcgaggatctcctgcggcaagtcccacaggtagtaggactggtccttgcggttgtcggccgcacgggtgacgtatcgtttgccgcctgcggaggtaatgcggaaatagtgtcccgtagcgatgtggcgaatccccagtgcgtcggcctctgccgcaaggcagggccatttgatccgactgttgcagcgcgtgcacggagccggggtacacccccggaagtaactgtcggtaaaatagtccaccacctcccgttcgaaccgctcccgcaccgaccgcattcgccaaggaataccgagtgctccggcacgcagacgcgccttttccaacaatgcggaatcgcctctcatgtcgagcgtcagagccgttacatgatatccggccgcctgcaacaatccgacggcggcgaagctgtctattccgccgctgaaacccaacaatacccgattatccttcataaactcctgtcttcatgagaaccggctgccgaaatttcggcagccggttctgtcaagcatattcttccggcttcgggtgttcttcttcgaagaattccggtttttcccgtttaatgaacccgatcacctcttccaagccttcgaggaatttggaaaaatcctctttgtaaaggaatattttatgccggtcgtaactgaccgttccatccggcgccgttttcttccggctctccgtaatggtaagaaaataatcgttcgcacgcgtagcgcgcacgtccagaaaataggtccgccggccggcttttacgactttcgacaggatctgttcgccgaaatcttctccgtccgtgcggaaggtattcagagcagccatacaaggtaatattttgagggttattcgtttgttccatacgtaaatataaaacaaatttcgttttcctgcaaattcttgtccgtgattatatactctttgggcgtgcagcgattcaaaccccttccgggaagggaatttcggggcaggccgaattataaactcaattacgagtcgtgaatacgcgactctcggaaataacgtgatgcaaccgcttattgccgctcatgctgcgcttccaggagcggcagcccctctgcctcccagtttttcagcaaattgagcgcccggatgaagtcggcatcatcccttgcgtgcaatatccgcagcagagcttcccggtcgaaaagccgctctgccagcaatgctttgagcaggcgcctggtccccgcttcgacatcggaatcttccgccggaggtgttacgccctgttccagtcccagtccgatcaactcctcatacatttcatcgggaacttcgaaccgctcctcgaacgatgcgaactccggataatcccgttccagggctgtccggttgcggtccaggtagcgctgcataaattcaggaaagatatttttccgcagcagggcgttcagataagatgcctgcaccgtatcctgtattacgcacacgtcgggcgctatgcctccgccgccgtaaactgtccggcccgtgcggagtgtccggtaggccggcgacggaatcgtgtcgggcagcggatgagttcggtaagccgtgcgatccccgcctttgacgtaaggacgttgaatttcccggcccgaaggcgtatgatagcgggcgacgaccagacgcagggccgacccgtccggaagcagatattggcgctgcaccaacccttttccgaagctgcggcgcccgacgattaccgcgcggtcccagtcctgcagcgctccgctcacgatttcactggccgacgccgaccgttcgtcgatcaggacgatgagccgcccttcggccggaaataccggattccggcgggcggaatggactacggacggtacgctgcggccttcggtcgaaacgatccgcgagcctttgggcaggaaaaagccggacaaagcgatcgcctgatccaacagtcctccgccattgccccgaagatcgagaatcaactccttcggacggtccagctcttcgtaagcccgctgcacctcccgcatggtggtctgaccgaaacggatcagtttgatgtatcccaccgcagaatcgacgcggtaggccagctcgacggaggggagaggtatttcccgtcggacgatttcgtacagaatcggttggcagactcctcgtcgaatcactaggatttttactttcgatccggcatctccccgcatgacggagatgagctcggaggccgggatctccttcacggtgcgtccgtccacccggacgatccggtcgtcgggacggatgcctgcttcttcggcggcccctcccgacaggagggaggttacgaccagcgaatcacggatccattgggtctgaatgcctattcctccgaacttaccccgatagaggctccagaattcagccatctccgcagccgaggcatattcggtatggggatcgagttgctgtaccatgctgcggatcgcctcctcgaccagcggcgccatatcgaccgaatcgacatacatcttgcggatatattcgtaagaccgctccagcttggcgagcgaccgtcgctgtgcccggtcgggccgggaaacggcgatatcggccgtccggaacgatgataatcccgccacggccagcaacagcccgaaaaaccacatgctccgcttcatatcgaattacatgattgcatatttttccgtccggcgtcctcccaagcaggtaccgcgaaacaccgggaaatgatttccgactgcgagcagggaggaaaggcgtgaaccccgtcttctttccggcgattcggtagagccatagataccgcctcggatgcacccacattcggaacggggcgtatccgccgataactctgctctctcaactaccgccggggcggctattccgcgtccgctcggacaggcgcttcggattatctataactaattatctaacggagtgcttcggccagtcgggtgaacggcacctgggtctgttcgccggaggtcatatccttgatcgtcgccacccgttcttccagttcccggctgccgacgattaccacgcaggggattccccggcgattggcatactccatctgttttttcatctttccgttttcgggatatatctccgccggaatacctgcggcacgcacctcctgcaacagtttcagcgaggcatgctcttccgcttcgcccagattggcgaacatcacccgggccgcacagcccagatcggccgggaagagtccgaggccggtcatcacgtcgtagatgcggtccgcaccgaacgaaatgccgacacccgacatgttcggcattccgaagatgcccgtcaggtcgtcgtagcgtccgccgccgcagatcgacccgatggcgaaatcgagcgccttgacttcgaaaatcgctcccgtataataattgagcccccgggccagcgagaagtcgagctcgatcggcagctccacccccagccggttcacgtacccgaagatcgtttccatctcggaaatgccttccagtccgacagccgaggcgccaatgacatctcgcaacacagccagtttccgttcattatcgcctgtcaattcgagtatcggttgcagcttttcgatcgcatcggagccgatgccgcgttccgtcaattcagccttgacagcctccaatccgatcttttccagcttgtcgatggcgaccgtaatgtcgatcatcttgtccgcatgtccgatggtttcagcaatgccgtacagaatcttgcggttgtttaccttcagcgatacgttaattccgagcgtccggaaaacccgttccacgatctgtatgagttccacttcgcacagcagcgatcgggtgccgatgacatccacgtcgcactggtaaaactcccggtagcggcctttctgcggacggtcggcccgccagaccggttgtatctggtagcgtttgaacgggaaggcgatttcgctctggtgctgcaccacataacgggcaaaaggcaccgtcaggtcgtaacgcaatcccttttcgcaaattcgggaggccgtgcgcaactcttcgtcattcagtccggcggcgtaatcccccgaattgaggattttgaaaagcagtttgtcgccttcgtcgccgtatttgcccagcagggtggagaggttctccatcgcaggcgtttcgagcgggccgaagccgaaggtgcggaaaacgtcccggattttgtcgaaaatatattggcggcgcatcatctccagcggggagaagtcgcgtgtgcccttgggtatggagggtttttgtgccattttattccaccagttttctgtattttacacgatggggctgcgtatcgccgccctgcgctttcttccactcctcgtattcgctgtacgaaccttcgtagaagaccactttcgaatcgccttcgaaggagaggatgtgcgtggcgatacgatcgaggaaccagcggtcgtgggagatcacgacggcgcagccggcgaaattctccagaccctcctccagcgcacgcaacgtattgacgtcgatgtcgttggtcggctcgtccagaagcagcacattaccttcctccttgagtgcgagggccaggtgcaggcggttgcgctcgccgcccgacagcatgccgcacttcttctcctgatcggcgcccgtgaaattgaaccgggccacgtaagcgcgggcattgacctggcggttgcccagcataatcaggtcggtaccctgcgaaatcacctcgtaaacggttttttccgggtcgatggacttgtgctgctgatccacgtaggccagtttgaccgtctgaccgacagtgaaagttcccgaagtaggctgttcgagtcccatgatcatccggaagagggtagtcttgcccgtaccgttggggccgatcacaccgacgataccggcaggcggcagcgagaagttcagtccctcgtacagcacccggtcgccgaaggctttcgatacgtcgtgcgcctcgatcaccacatcgcccagacgcgggccgttcgggatgaatatttcgagcttttcctccttctgtttggtatcttcgttcatcagcttgtcataggccgacagacgggctttcgacttggcgtgacgtccggagggggacatacgcacccactccaactcgcgttcgagggtcttgcgacgcttcgattcctgcttctcctccatagccatacgggtcgtcttctgctccagccagcccgaatagttacctttccagggaataccttcgccgcggtcgagttccagaatccagccggccacgttatccaggaaatagcggtcgtgcgtcacggcgatcaccgtgcccttatattgttgcaggtgttgctccagccagtcgatcgactcggcgtcgaggtggttggtcggctcgtccagcagcaagacgtccggctgctgcaaaagcaggcggcacaaggccacgcggcggcgttcgccgcccgagagtaccttgacgctctgatccgggtcgggacagcgcagggcatccatcgcacgctccagtacgctgtccagctcccagccgttcacgtggtcgatctgttcgtacagttcgccctgacgctcgataagtcgggccatctcttcgtcgtccatcggctcgcagagtttctggttgatctcctcgtactccttcagcagggctacggtcgaggcgcagccctcttcgaccacttcgcgcacggtcttggcatcgtcgagtttgggttcctgttccaggtaaccgaccgtataaccgggcgagaagaccacttcaccctggaaattcttgtcgatacccgcgatgatcttcatcagagtcgatttacccgagccgttcagaccgatgataccgatcttggcgccgtagaagaacgagaggtagatgttgttgagaacttttttctggttggtgaaggtcttgcttacgccgaccatcgaaaagatgattttttcgtctgccatatttttctttttgaattatttgcggagttacaccggaataacgcaggtcgcgctgcaagccaacctgtttcgacttgtccgaaacgcgatctgtccgggtccgaatctatttgggaacaaagataacgcaaaccgggcggagcgccaaatttatttgttctccgcagaaatacggcttttccgcaaaggcacgcgaacaaatcgcagtgcgaccgttgccctcttgttgaaaaactacaacggaatgcctgtggcataactggtgctttcgcccggatcgaagtttacgggaaaagagatcagataccggcagggatgccccatttcgagaagcggcgtccattgtcccgatgtgtcgagaatcagtttctgcacgtgttccgtcagtgcaggatgaggtgattccgatgcgccgaccaaagtgattgtgccgtcaggctctatatagaactcgacacgtacggtgccgtacacacccgcttcgtacaacttcgtatcatatacgagatttcggttcaaatattcgcggaaagccatcaatccgtcctttttaccccggaatgtcggcttgacgaaagctcccggcaggaaattcatattgatcagcatttttcgcacatacgggatttttcggccgtccttgtatgccggggtgaaagggttcaattccgataatgccgtattcaacagctcccggctgcgctgggtcggattgaatcgcactccgcccagcgaatcgggatattgtacatcgacgcagcgtcccagcgtgtctatcgtaaacttcataagcaattcatgcgagagttcttcgattcggtagccgtcccgcttcatgactttcgtcaccttcttctcgaattgtttgcgaaaaacatccgggtcgtccgaccctgcatatcgcggcggaataatctgcgctgctgccggcaaacttatcaggcaaagaatgagagaaattatttttctcataatgtaaatgttttatcttaacctgaaatcgaccggaagcacaaacttctgtcggacgggagcgccaaaatagagcgcgggtatccatttgccggaagtcgataaaataattttcttaacacgataactcattttcggatgcggcgattccaatactttatcgatttcgacggaaccgtccgtattgacaataaagacgatgattacccggccggaaacaccccatggccgaagctcttcgggatattcaactctttttgcaatatatttttcaaacacagtcaaatcattcggctcgctctttttaaaacaagccggggtagttacttcagggatataggcaaaattgtattccatcgtctgtcggtaaggaactttttcgcccctttccgtcgcgggctgaaaagaatcgattccggccaacgccgtgcgaagcaactccaatgtccgttctttcacgataatcgtttggcggcgacaggtgtcgggaatttccagatcgatgcagcgtcccagcgtatcgatggtaaaattcatccagaagtagtgaataaggtcatcaggagtatagccgtcgctatagtaaacctcagtcacacgttccataagcgcttgccggaacagctgaacatcgtccgaaccttgaaataggggaggagtggtttgggcctccgcaatcgtgcacgaaaaacaggataaaaacaagagcaggatctttttcatgggaattgggtataatatttgattaaaaatacgacataattcgtcgcggtccaaatattcctgcggcaaaatgcaacggatataaaaaattccaatgcgaacataagaaataaataacggttatcgatggcttttcccgttcgtttatcgtatatttgtagagagaaatcaaccacacaaacaaataaattattttcagtatgagcaaaagtgttaaaggtaccaggacggagcagaacctgctcaaagcatttgccggcgagagccaggcacggactcgttatacgtttttcgcaagcgtagccaagaaagagggttacgagcagatcgcaggtgtttttgcggaaactgcggatcaggaaaaagagcatgcgaagcgtttcttcaaattcctcgaaggcggggatctggagattacggccagttatccggccggccggatcggcaccacggctgaaaacctgctggcggcagccaaaggggagaacgaggagtgggacgtgctctatcccgacttcgccaaagtagccgaagaggagggcttccccgaaatcgccaatgcattcaagcagatttccaaagtcgaggcggagcatgagcgccgttatctgaagctgttgagccgcattacggacggcaacttcttcaagcgcgacggcaagatctggtggcagtgccgcaattgcggatttatctgcgaagcggaggaagcgccgaaaatctgcccggcatgccagcacccgcaggcatacttcgaacccaagaaagacaactattaacggagttcttttatcgaacgagcccggatccgttcagcggatccgggctttttatacaatccagggcttttttcggttggacaggtcgtaccggagatatgcggatgaaaagcgataataaggcattatccaccgaaacgggaacggaaaatccaaaatggaaacggttacaaccccaacaggaggcgggtatccgtcatgaatcgctcgtaccgcagccgtgaatcggccggcatggagagggtgtcgccgacctccgaaggggtgatccggtagccgggtgtcaggacccacaccggcgtcagttcgagcgagtagcgcagcgaaccgtcgggagaacgggttacctcgacggtcgccacgattccgccgtcgcaataacgcttccgctggttggacacgaaattaccgagcgaatagagtacgatcccgttactgtcctgttcgtaaggctgtacgacatgcgggtggctgccgacaatcagatcgaccccgtgtcttcgcagaaacccggccaactgccgctgcaccttgttcggtcgacgttcgtattcgttgccccagtgcatgcaggcgatcacgcaatccacgccgtcgtgctcgaccgccgccaggtccgcggcgatccgcaccgtgtcgatgggattgaccgacaatccggaagggaccggaagaccgttcgtaccgtaggtgtagttcagcagggcgaaacgtatgccgcccgcttcgaaacggagcggatgcctcgcccggaaatccgagctgtccagaaaaacgcccgtatgttcgatgccgtgccggtcgagttcccggatcgtcgtacggatgcctttcgatccgccgtcgcagcagtggttgttggccagtacggtaatgtccacgcccagggagtcgagtgcctcggccaaagccgcaggggagcggaagcaggggtaacccgtatagggtccggattcggaaagggtggtttcgagattgacgatcgctgcatcggccgcacggaagcgctcccgcacccagtcgaaagaggcattgaaatcgaaatcgccttccggcgtacgcgctgcggtgagctggggcgtatgctgcatcaggtccccggcgaagaccagccgggcacgccgtacctccgggagggatggcttggaaggtatgtcgatttcggctgtccggctccgatgcgacagcgtgtgggagcaacagacgtaaagggcgccggctgcagacaatccgatgattgtcagaacgatgattttcgaaaatttctccatttcccgtcaaaaatacgatacggggcagaattatccaaaaaactccgtagatttgcgtcggcgttgatgggcgcattccgaaaatagattgttatgaataatttgcgaggtgtgctgtatgccgtcgtttcgtcggctacgttcgggttgatcccgctgttttcgattccgctgctgcaaggaggtatgtcctccccggcgatcctgttctaccgcttcggactggccgccgcgatgatggggctgatcgcccttgcgacccggcggccgcttcgtattacgtggccgcaaaccggcacgctgttgcttctgggtgcgatgtattccgtgacggccctcgggctgttgcgttcttacacctacattcccagcagtgtggccacgacgatcaactttctatacccgctgggcgtggcgatcgtgatgacgctgtttttccgcgaaaaaaattccgtctggctgctggttgcgatcctcatctcactggtgggtgtggcgctgctttcgtggggcgatatcggcggtccgcagagcgaccgtgccatcgtcggcgtcgggttcgcgggagcgaccgtgctgacctacacgatctatatcgtcggtgtgaaaaaaagccgtatttcccggctcgatccgatgatccaggctttttatgtcctgcttttcagcgcctgcttcttcctcgtgtacgctctgtccacgaccggtgctccgctgcccggcaagtggcatctctggcaaaacctcctgttgctggccctggtgccgaccgttgtatccaacctgacgctcgttctggcaatcaaggagatcggttctacgatgacatcgatcctcggttcgatggagccgctgacggcagtactcgtcggggtgctgcatttcggggagaagttcggcctcgacagtgcctcgggcctgatactgattatcacggcggtcatcatcgtcattcttcaggccaagaaaaaagaacatccgcaaaccctcccgcacgaaagcatccattagcttcggcagtaacggctgcggaggaaaccttccgacaaggagcgacggactaccgctcctttttttcaggccgcttgggaaaccaccctttttcgacccgcttgcgctgttcgaacaattcgccgatactccagaacgaagaggcgccccagactgccaacaaggtggaccagacgatgttttcgaccagtacggaaccgatgaccgccgcgattcccatcaggaggaaaatccaccagatccgcactccgaaatagtattcgcctttagtcaccagcggatgaaaaataccgatgatgagaaacgtggcgacaccgatcatgatgccggccagatgatattccatcaaaaattccatagttcaactcttctttgtttttccgaacaaaatacgtgccccgtcggaaagacagacacggaacacgctgcaggaaatgtcccgtcgatgagcagttcgttcgctgcaaagatacgattaagccgagggcaaaaacaaatttatttgtactttgccgaggcggagtatctaagacgaagtcaaagattgggattaagcttcggcaaaagcaaattttatttgcattttgccgaagcgggacggagtcaaagatacggaaagccgagagaaaacgggaatttgttcacagttttccggggcgcatcctatcttctacaaagatagatgcgggattgcacgtaaagatttccgggccaaaatcctatccgtcgccctcaaaatataatccccggcaaaacaaaattggtttgttcgaccggggtgttatatcgagatgcgctgcctaacgccggtatttgagccgcaggctgttggctaccacgctgacgctactcaacgccatggctgccccggcgatcatcgggttcagcaaaaagccgctgacagggtagagcgccccggcagcgaccggtatgcctacgaggttgtagataaaggcccagaagaggttctggcggatcgttcgaaccgtctgcttggaaagctgaatcgcctccggaatcttccggaggtcggacgagatgatggtcatctgcgccacgtccatcgcaatgtcgctgcccccgcccatagcgatactcaagtcggcctgagccagcgctgcactgtcgttgataccatcgcccgccatcgccaccttatgaccgagggtttgcagacgcttgacgaacgcggccttgtcctgcggaagtatttcggcctcgaaatgccggatacctgccttttccgcgatatgaccggccacagctcggctgtcgcccgtcagcatataaacgtcgatcccggcggcttgcagttcgcgcacggcctctacggagctatccttgatgcggtcggcgatcgccgcgacagccagggcttgctccgaatcggcgaaccagacgatgctcttggcttctgccgacaaccgctgcgcttcgatattcaactctttgccgacgacgattccctgctcgtcgagcagccggcggctgccggcgaagtaacgcacgccatcgaccgtaccttctatgccttttccggtaaggcttccgaatcgttcgacgttcagcgtcggcacacctgcaaaatagtgcacgacggcatcggcaagcggatgttccgagagtttttccaggctgaaaaagacggctttcgcccggtcgtccccgttcgcccagacaatgtcggtaacgacgggtttcccttcggtcagtgtacccgttttgtccattactaccgtgtcgatttttccggccgtctccagacttacggcgtccctgatcagaattcctttctcggcccctttgccgatgccgaccatgacggccgtcggagtagccagtcccaatgcacacggacaggcgataaccagtacggtcacagctgccaggattccgtgcgtcaggcctcccgacggatcgaaaaccaaccacaggacgaaagagagcagggcgatgccgatgatcgcggggacgaatatgccggcgattttgtccgccagcttttgcacgggagccttgctgccctgcgcctcctggaccatgcggataatctgagccagcatcgtcgcggctccgaccttctccgcccgaaagtggaagctgcccttctggttgatcgttccggcgaaaactttcgttccgggctccttatgcacgggaagcggttcgccgctcaacatgctttcatcgacataggagtcgccttcgcaaaccgcaccgtccacggcgatcttctccccgggtcgaacggccaggagatcgccgacccggatgcggctgatcggaatctccgtctgcgtaccgtccgcagcgacgacgatcgcattttttggttgcagaccgatcagctttttcagcgaagcggtggtatcgcctttagccttctcttcgagcgtgcgccccagcaggatgaaggcgatgatcaccgccgcagcttcgaaatagacgtgaggttccactccccgcgagagccagaactccggaaaaacgaggttgaacagactgaacaggtaggcgatgcccgtactcaatgcgaccagcgtatccatcgtggccgaacggtggcgcaactgctgccaggcattcacgaaaaatccgcgtcccagccagaagacgaccggagcggacaacagcgccataatcgcaccgccgtagggcatatccataaagaacataccgatcacgaccaccggaatcgccagcacgacagcccagaaagcccgccgtttcaggtcccggtaccgctcccggttcatccgctccaactcgtcgggcgtgtcatcatccgaatcggcgagcatgtcgtaaccgccctcctgcacggcttgccggagtctttccggcgaggtctgcatcgtgtcgtattcgaccgctgcggtcgaagccgccagattgacggaagccgcgacgacgcccgtctgggcattgagaattttttccacacgtgcagcacatccggcgcagtgcagccccgcaaggggaaaagtccgttttacatatttacctttcgacatactttttgattttttacagacagggacgagcacggaatatccgcacgcccttcgtgtcctttcgatacaaagatcgggacaaaaagggcggaaggcgttatataattccggatactatttacaagatttcggaacgaccggcggattacaccttgtccagcggtttgcgacggttctcgccgatcttccggaaatggctgggcgtaagtcccgtcaccttcttgaactgggcgctcaagtgggccgtactcgaatagttcagcttgtcggcaatctcgccgagcgacagctcgccgtaagccagcaactccttcacccgttcgattttctgtgcgatgaagtattgttcgatcgtcgtgttttcgatctccgaaaacaacgaactcactgccccgtaatcctgatgcaaccggtccgcgatataatccgagaggttggtccgcaaagcggcgtccttctcccgcaccagctcgatgaccgtattcttcacccgctcgacggtctgcttgcggcggtcgtcgatcaactcgaacccgacggcgcggagcgcttcgtccaactcctttcttcgctcggcagtcagttctgcgggcagcacggcttcgccgagaacgaccgacgaggcctcgatccccgcctgccgcaaaatatcgcgcacgaccagaatacagcggggacaaaccatgttcttaatgaagagtttcatcggcaacggaaagaatttgtcgatgacaaagatacgattaagccgagtgcaaaagcaaatttatttgcattttgccgaggcgaagtatctaagacgaagtcaaagattgaggaaaagccgaggcatatcggcaggttacggtagagtaggtcgatattcggtgaatcgaaatatacaatcaaaaaataaataacatttgacaggcttgcataactgtcaatttttatttaatttagtcataaaaagatggttttatactatgtatgacgcctttatttgatactataacgctttctatgataaaacgccttaccttcagcttactcctgacctgtttgtatgttccctgtttttcccaggaacgcttcgttgtccggggccgtattctcgatgcggaatccgctccggttccttattgttcggtcagcattctcgaatcgcgcgactccacggtcctcggaggcgccgtttccgacacggaaggccgttacagcctgcatttcgagcaggcgggccgctatctgctctgctacgaccatctggcctacgaatcctgctaccgaacggtagaggttccggaggcgcaaaccctgcccgatgtgattctacgtccggccagccgacatatcgacgaggtggtcgtggtggcccgaaataccgaatacagggcaggccgctacgaagtcaatatgttgggtaatccgatcgtccgcaaccggtccgtgatgcaggtgctggatctgctgccgggcctccgagtctccggaaacaccttgttcatcaaagggactccggtgtcggtcgtctatatcgacgaccggttggtgacggatctcggggagctttccgcccttcgtgccgaagacgtgaaaagcgtggaggtccagaacaagacgggagcggcctattccgccacgacttctggcggtatcgtccgtatccggctcaagaaactcgccgcaggcagtttttacggcaacgtatcttcctccgcgtccgtttcccgcgacggatattctacgggactcgccctgccgttctcggcccagtgcggacgattgggaatatatatatgtgtcgggttcctatggggagaacgaaacgctcgaccgcacctattccgaatttcgcaattcgggatactcgctcgattcggaggaccgggggcggatcacctcccggaatatccgcgaacttctgagcctggtttacaagataaacgaccgccattcgatcggtctcgggggacagattttcatgggagcgagcgacccgtccaatacggtgcacacgacctctgcgggattggcctggggcgatgtgccgccgcagatgcccgaagccggatatacgctctaccgctacgggggcacgctctacaaccggcagtatcaggggtcgctgaattatatcttccgtttcgacacgttgggttcccggctctctttcaaggccgactacctgcaccagaacgtcgatcggaattacgactacgacacgcgcgatttttcccggccggaggatgcggaacccttctccacggagttgcggcgcgagcgctacaagctgctgggacatctgttcgcgtcccggctcgacctgaacaagaatttttcggaagagcgcagcttcagcgcggggttgagctatgatttgcggtatgcggacaacaacgctcccgtgcatcgcttcgaggaggaagagtggatcccggacccgaagatgagtacctggtttatcgaccgcactcaaagcacgggtgcctacacccaatgggccgacgcctacggcaagttctcctatcaggcgggcctgcgactgcaatgggaccgcatcgcttaccggaatgccgaaaatacgggctacgaacatcgtgactactggcgactgttcccggaactcagcctggcctacacgttcaacccggaaaagggcaccaatatcaatctcgacctctatcggtccagcggccggctgcccgacaacaacgccctgagtccccgccgggtctggcagtcgcaatacagttataccgtaggcaacgaaaatctcgaacccggctgggggtacgacatcgacctgagctatacgctgcgcaacaaactgacgatctcttacggaggtacgtggtcgcgcggcagtgaaacgatgactttctatgaccccgacgatccgaacatcgtctatacgacgaaggtgaacggggaacacggctcggcgcataatatctggatcgattatacgacattggtaaccaaatggttccgagtgaaatctttcattcacggatattggtatcggagagaggtggatggcgactggcaggcttcgtacagtgccggaggtgggatgttcagcctttcccttatgttccagccgcatccctcgatgattatctatctggacggaggcgtcgagctgccccaaaaaagattggaaacctggcaaaattcctattgggctttagctgccggaataaccaaatcattctgtaaagacaaactgtatatatccctcgacgtgaacaatatcctttcgaccaaactgaaaaaggaaacggtacgctgggacaactcctactattccgtcctgcggcaacctcggggacacagaagtctgcggctggtcttttcgatcggctaccggttcaaccgaaatgccaaaaagagcgtatcgaccgtgcaaacgttacgagatccggaagaaattctgaaataggccgctcaagacccgtattcgaatccagtgcgcaagacgtgctttccgagaaccgtattttgtgaaacttttccgctcgatatatgaatagtggaattggcatcgcttttctccccggcaatccgaagcatttcggcgctttcacatctgccgcaaaaaccaaaaaaattacggacggctgcatccggcagccgcccgtaaaaaattccgccctccgaaatcagaagttgtagcgcaccatcagattgacccgattggcatggcccttcattccgtccatattttcgcgggtgccgtacaggtattcggccgcaagctgacagcagggggccaaatcccagaaaatattgccgaagacatactgaccgcgacggtattcgtcatcggcataggccccgttcctgcggcaaacctccgccatggaataaccgcccgaaatggcgagtttgttcggaacgaggtcgatttgcacagccgcctgccaaccgtacatcggcatagtctgaatactcctcggattgtgaggattgggtgtaaaatccagtccgatgcccgataaatcttggatgtagggagtgatgccctcgccgtacacaccgttgaagaagagttgcaggggacccgctactttgatatttccgctggcctggacgccccagccgaagagcgaagtattgttacccgtcgattcgttgtgcagatacatatcgcggaaaacggccgatgcccggaaatggctctccttgttccggccccaattcacctgcatataaaccgggaaatcaggtacgcgctgcggaatcgaagcgaacgaatcgccgtaggtgccgcttacgttcggtagctcggcggcaacgccgaatttcagaatatcgcggtagatcgaatgctcgtaacggatcatcgtcgagaaaaagtagttataggcattgggaccctggaagtcgatcgtattgggagcggcgttcaggtcgcagaacgtcgttacgtcgcgtccgaacgtgaaccctttgaacgatacgtaagccgaccggatacggggcgtataactgttggttcctccgccgcggaagtccgtactgaaatagagggtgacacggcccagttttttcgaattggcgatggccttcagaaatatgcgggaggtagttccgtccaggccgaatttctgacgggtggcataggtgccgggaacggcgatcgtggccggaatgaaatcctgtgctccggagattccgtcgaaatcatacgacgcacgcaaagtcacctggccgccgagcgagaaagagaatttgttctgcttggtggcgaagatgaagtgaggcagttcatcctgctggaaaccgggatgatgggtttcgatataatcccgaatggcattgtcgattgccagttggttcaatacggccgcttcgagcaaggcctcttcgtctgcgggcggttgaggtgcattgacggaaaccaaataaaccgtcggagagtattcgccggtctttacgctgtccttacggatctggtaggtctgggccgaaaccgaggccgcagaaaccgccagcaacattgcgattaaaagtcgaaaaattttcataagcaataaaattaaattattccgataatggcggatgccatctatatatgtatattacgattttggaagtcagacaattggtatttgcccgaaacgtggcaagttatatgccaaaatacccggcaagaacaggtgcagcaggtcggaaagcgggatcctccagcctgcgagccggaccggtcacggcatctgccagacgttcgaacctattcccggagtcttcggacggatgtcggtctcctttccctaaataaaatcccctcaaaaagtgtaaaaaacgaacagaaggcgttggcgaatcctgcaaatcggataaactaacggcgaaatagttatttccgaaacggtcgctatccgatatttttgtatttttgtaaaaacatatttttcatatgaaacataagttagtgatagcaatgactgcggcaacgctgtttctggtcgggtgcgggcagcggcaacatacggaacaggtaacgctcgtgcgcatcgataccgtaaaaacagcgaatacctgtgatattctcgaatttcccgcccgagtacaggctgccggagaagttcacctcgctttcaagatacccggaaccttgcaacgtatttatgtcgatgacggggcttttgtccgtcagggtgaacttgttgccgaaatggatccgcgcgattacgaacttcagttacaggcggtcgaagccgaatatttgagtatcaaggccgaagccgaacgtgtaatggcgctttacgaccaaaacgtcgctaccgccgatgcttacgacaaagcgcgatacgggctgcaacagattacggcgaaatacgagaacgcccgcaaccaattggccgatacgaaactgtatgctcctttcgacggctacgtgaagcgtcggcgtttcgatcctccgacggtcgtagcggccggaatgccggtcatcacgttcctgtcgggcaagaatcccgaggtcgaacttttcattccggcatcgacttacattcgccgtcgggagatcgcttcgtttgcggcggtgttcgattttctgcaagggcaaaaaattccgctgcgtctgctccatgtcgatccgagcgccaatgccaatcagctttacgccgtgcggttggcactgcccgtgaatacggagatcgcggcgacacccggcatgaacgcaacggtcgaagtcgccatgcggcaggaaacggaggcatcggtagagattcctgcatcagctctgttcagcaacggcgacaagacgagttacgtgtggatttaccgacaggacgggacgatcgcacgccgacgggtcgaagtagtccgtctgcatacggacggaacggcgacgatagcggatggtctgaacgaaggcgaacggatcgtcgtggccggagttcataaattgacggaaggccagcgggtcgcaccgcttcctgctccgtcgaaaaccaatgaaggagggctgctatgatcgacttgggcaaatgggctttcggacacagcaagctcgtctattttctgttggcggtactgttggtaggcggtctgaaatcggcctacgacatgggaaaactcgaagatcccgaagtcaaggtaaaaatcgccatggtggtcggggttcgtccgggagcgtcggcgcacgaaatggaactggaagtgaccgacccgctggaaaaggcgatccgtaccgtcggagaggtggacaatacgcagagttggtcgtacaacgacctctgcatcatacaggtagaactcaaaagtacgacgcccgatgaccggctcgaacagtgttgggatatgctgcggcacaaggtttccgatgcggaagcgtcgttgcccggcggtacatccgtgacggttcaggacgatttcagtctggtttacggtatgttttacgccctgaccgccgaaggcttcagcgaaagacagctcgccgactatgccggactgatccagcgcgaattgaccgatctcgacggcgtggcccgggtggagctttacggaaagcgcgaggagagtatcgatatttcgctgcgtgcggaccgaatggcgacactcggcatttcgccaacagaagtactcgccaccctgaacggacaaaacggcactttctatgccggttactacgacaacggggatcaacgcgtgcgcgtaacggtcaccgataagtcgcgtacggtcgaacagatccgcaacatggtcattcagggccatgaagacgaccagttgcgtctgggggatattgcgaccgtagagagcggctatacggaacccgtacgcaattcgatgacctataacggtgaacatgccgtcggtatcgccgtagccgccgcctcgggaaccgacatcgtaaaggtcggcaatgcggtcgaacggcggctcgccgaattacaggaggaacgttttcctgcaggcgtcgcttgccacaaggtcttctatcaacccgaacgggtaacaggggccctctccactttcttcatcaatctggtcgaatcggtattgatcgtcatcgcgattctgatgattacgatggggttccgcagcggcgtaatcatcggattcagtctgcttacgatcgtcatcggcacgtttctgctgctgggtatgaccggcggcacgatgcagcgggtttcactggcggcgttcattctcgcaatggggatgctggtggacaatgcgatcgtcatagtagatggtattctggtcgatctgaagctgggcaagccgcgccgcgaagcgatgtgcgccatcggtcgtaaaaccgccatgccgttgctcggagctacggtcattgccatcctcgcatttctgcccgttttcctttcgcccgatacggcaggcgtctatgtgcgcgatctgtttatcgtgctggcggcgagtctgctgttgagttgggtcctggctctggtgcacgtgccgctgatggcgaatcggcttttgaagcaaccgtcgaggaccgagggaagcggtaaactgtatgacagcacgttgtatcgtcgtttcggcgatctgcttcgcttcggtttgcggcaccgtatcgcggccctgtcggtcattctcgttctgctcggattgagcgtctggggattccggtacgtgcggcagggattctttcccgatatggtttacgaccaactctatatcgaatacaaattgcccgaaggtacgaactccacacgggttgccgccgacctgcgggaaatcgaagcgtaccttaagactcgtcccgaaatccggaacgttgttgcgtccgtgggcgggacgccggcacggtataatctggtgcgcagtatcgccacgccgtcgctctcttacggagaattgatcgtcgatttcgaatcgcccgaatcgctggtggaaaacatggatgtcattcaggaggatctttcggcccgttaccccgacgcgtacgtcaaggtgaagcgttataatatcatgttcaaaaaatacccgatcgaagtgcaattttccggacccgatccggcggtactgcaccggttggcggattccgcacgaatgattatggcgcgcacgccccaggttgcgcagatcactaccggttgggaacctgcggttcccgttttggcggtggattaccaccaggcggccgcccgtcgcgccaacctgagccgccaggatatcgccacctcgttgctgacggccgaaggcggtattcccgtcgggacgttctacgaaggagtacatcgcaatacgatctatctcaaatgtacggcggccgacggctcgcgcatcgacaatccggagaacgtacccgttttcccgatgctcccgaatgtaaatgcgctgcttgacgacgagctggtgggaagccttcagaccggcacgctcgacaaaggcgatatcatccgaaggctggcgcagaccatccccctcgggcaagtcggacggggtgtcggcattcgctgggaagatccggtcattccgcgctataacggtcagcgcatgcagagcgtgatgtgttcccccgcaccgggtgttgaaaccgaggcggcacgacaaactattgccgaacagatcgaagacattccgttgccgaccggctattcgatacgctgggatggtgaaaaaggggcccgtgaccagacgatgtactggcttttcaaacaggtcccgctggccgtagtactcatcatcgctgttctgattctcttgttcggcgactatcgcaagccgacgatcgtgttgtgctgcattcctttattggccgtcggcatcgtcggagcaatgttgctgaccggaaagacgttcgacttctgcgccattgtgggtgcgttgggattgatgggcatgctgattaaaaattgcatcgtattgttggacgaaatcggccagcggtgcagcggcgataccgacctcatagccggactggtcgtcagcgcccaaagtcgtctgcggcctgtgatgatggcttcgcttaccaccattctcggtatgattccgctgctcggcgatgcgatgttcggttcaatggctgcgacgatcatgggcggactgttcttttcgaccatcgccacgttgttgtttctgccgatactttacgccctgtttttcaaaatcaaaacgaaataatacgattcggccgcaggccataccttaccgttcgtgccgcaccgatgcggcgcgaacggtgtcgatattcgacgagcgcatcgaacaactgcaacacaatgttcgcccgatcttcggcgcagggcagaacgacgggtgcaaacggacccggctttcactatctttgaagtactccgctgcggcaagacgcaaataaaatttgcttttgccctcggcctaatcgcaatctttgacttcgtcttagatacttcgcctcggcaaagtacaaataaatttgtttttgccctcggcttaatcccaatctttgacttcgtcttagatactccgcctcggcaaaatgcaaataaatttgcttttgcgctcggcttaatcccaatctttgacttcgtcttagatactccgcctcggcaaagcacaaataaatttgtttttgccctcggcttaatcgtatctttgcagaagataggaggcggttcggcaatctgtacgtgccaattcgtgcgattgccatcatcttattatctttgcaaaaacgattccgtccggtcgatctgtcgataaaatgccagagagcgactgaacgcgataacgaaaaaatcgagctatatgatctggtttctgcttctcctctccctgctttttgccggggtggactttctcttctaccgggtgcggatgcgtcggcattccgagcgccttcgccgcgccttcgtctggttcgcggtgttttcggatgcgcttccgatcgtcgtggtgctgctgctcaaggccgtaccggacaatacgacgggctggatgcaggcagcccaatggtttaccttcgtcttcctgttgctgatcggctgtcgttacggctattatttcggtttgttgttcgatcggcatcggagtttcagtcgggtaggggcgctcttcgctgtcggatgtgccgtatggctcgtatggggagcggcttggggcagacaagccctgcgggtgaacgaagtcgaaatccggaccgcagcactgcccgccgcattcgacggattccggatcgtgcaattctcggatctgcacatcggcacgctcgtgcggccggaacgggagatgaaccggctcgtggatacgatcaatgcgctgcgacccgacctcgtcgtcttcagcggcgatttggtcaatgtccgctccacggaactcacatcggacgtattggctattctgggaaggcttcgcgccccgtacggtgtcatctcgaccctgggcaatcacgacgtgggactttatatcaaagataccgtcgccctgccgcgtgctgaaaacaaccggcaggtaatcgaccggcagcggaagatcgggtggcggatgctgctggattcgaccctctacctgcgccggggcagcgattcgatttcggtgacgggcatctcgttcgatcccacgctgcaaaaattccgacattcgttcgatcttcccgaaatatccctcgcaaccgcttacgaaggcatgccggagggtatgttcaacctgacggtttcgcatctgccgcaactgtggcccaatatcaccgccctcggtcgcggaaacctcacgctggcagggcacgtgcacagtatgcagatcaagggacatctcttcggacgggcgttctctccggcacaactgatgtacgaccgttggagcgggcgctacgacgatgcggccggcaatacgctctacatcaacgacggaatcggatacgtcggttttccgatgcggctcggcgccgatcctgaaatcaccctttttacgctgaaaaaatgaaagtgaccgtttccaccgccgtttctgcggacggatatctggacgaccgttcgcccgaccgcctgatcctctccacgcccgaagactgggccgaagtgcatcgcctccgggctgcttgcgacgctattctggtcggggccgaaaccatccggcgggacaatccctcgctgttggtaggcgacgaagttcttcgtcgggaacgaatcgaccgggggctttcacccgatccggtcaaggtaacgctgaccgcttcgtgccggctctcgccggaggccaatttcttcacccggggagatcaggaaaagatcgtcttcacctcctgctccgaccccggtcccctgcggcaggtggcgacggtgatacccgccgcagagatcacggctgctctgatcgttaccgaacttgaaaaacggggacttcgctccctgctggtcgaaggaggagctgcgacgctccggatgttctttgccgaaaatctggtcgataccttccggctggctgtcaatccggccgtaaaagtgggggatccccgggcaccccgtttggaggtcggttccggttatctgcaaacgccgcattcgaccgaatcgttgggaggaatgcgggtcacgacctatgcgatcaagcccgaccggaccgccgaagaccgccgctacctgcaaatggcgatcgacgaaagccgcaaatgtacgccctcgacctcttcctattgtgtaggtgcagtgattgtaacgactaaccgaaagatatttacgggttacactcacgaaacttctccgacccaccacgctgaacaggaagcgattctgaaagcgcttgcagcgggtgtcgaattgcggggggcgaccatctattcttcgatggaaccgtgctccgaacgaaaaagtgaaccggaaagttgctcggaattgataattcggcacgaatttcgccgggtagtttttgctctatatgagccggactgtttcgtttgttgccagggcgccctgaacctccgtcgccacgggatcgaagtcagcgtcgatgagacgctgtccggtcaggtccgagcgataaacgcacatatcggacattgaggagcatggttattttttgttctgttttacgccgaatattggcctaaacagccacaacaaattatacgtacgaatattcgcactatcttcgcataaaaatttagaagaccattttatgaaccgtgtaatcgtttcatttttcgctctgttagctgccgcacctctggcggctcaggagcaaacgccccgggtactttccctggatgaagccctggagatcaccctctccggaagtccggtcatcgaagcctcgcgttacgaagaaaaagccgcccagcaggaacggcgggcagcgatcggcttgcgtatgccgcaaatcagcgtaggcggagcctacacctatttgggcaaggacatcggattcgacttcaacgatttgaaagggcctgtcggaaacatcacccacgacattctcggcagcgggctgatcccgaccgaattgatcccccagattcagcaacttctcaccccggtcatgggagcggattggttcctgacattgcaggaccgcagtctcggattcgtcggagggcaggtaaccctgccgatctatatgggcggcaagatcaacacggccaaccgtgccgcgaaaatcaacgaaaagactgcagtcgagcagggaaaccaaaaccgcaacgcgctggtttcggagctcgtggagcgatactacggtctggcgctggcccgacaggtcgtcgaagtacgccagcaggtagtggatggagtaggccaacatctgaaggatgcgatcgccctcgaacagaacggtatgatcccccacagcgaacgtctttacgtcgaattcaagatggccgaggcggagcgggagcttcaaaacgcccggttgcaggtcgaaaccatcgccagtgcactgaataatacgctcggacagcaggcagaggttctgcccgtaacgacgatgttcgtactcggcaacctggaagacgtagcctattacaaagacctggcggccaagttcaatccgctgctcagccaggtagccctcaagcgccagttggccaaggaaggagttcggttgcaacgggccaatttcctgccgcaggtcgcggcgatgggcggagcctcgttctacaactaccaggtaactaaaataatgccccgctgggcagtaggtgtcggcgttaatctcaagattttcgacggcctgaaccgcgaatacaaatattcggcggcaaaacagacggtcaagcaagtggaagtgctggaaatgaaagccggcaaggacattgcagtactgatcgaaaaactctacaaccaaatgaacaactatgccaaccagatgaagtcgatcgacgcttcgctcgcatttgcggaggagtatctcaaagccaagaatgcggcattcctggaaggtatgagttcctcctccgacctggtggatgccgaactgaatctcgccaaggtgcgcaccgagcgtatgcagaccgcctacaattacgatgtcgcactggccaagttgctcgaagccgccggcatcagcgatgagttcatcagctacctgcaccgtaccgacgcccgtcccattcatttcgacaaagagtaaatatagataatctcatgaaaaaaagtaccattgtcacgatcattctgattgccgccgctgtcgtgctgggcgtcatcttcatcagttggtatttacgcaaggccacgcccctgtacatccagggaacggtggaatgtactacatacaaagcttcgtcgaaagttcccggccgtatcgaggagatgaaagtagaggagggacagcacgtcaccaagggcgaactgctctacacgctctcgacccccgaactgaatgccaagttgcaacaggccgaagccgtgaagagcgccgcatcggccatggaccagaaagccctcaccggtgcccgtatccaacagaaggaagccgcactgaatctctgggaaaaagcccaggcaggactgttgttggcccagaaaaccttcgaccgcgtgaacaacctctatgaacaaggcgtcgttccggcccagaagctggatgaagcccgcgccaacctgcaggcgatgcaggcgaccgagcgtgcggccaaagcgcaatgcgaactggtattcgacggagccagcaaggaggagaaagaggcggcagccgcccaggtacggcaggccgaaggcgccgtttcggaagtggagtcctatctttcggatgccttggtttacgcccctgtaacgggcgaggtttcgacgatcatcgccgaagccggcgaactggtcggaacgggttatcccgtagtggcgattctcgatatgagcgacgtatgggtgaccttcaacatcaaggaggatctgatgcccgacatccatatcggaacccgtatgacaggctatatcccggccttggaccgcagcgtggagttcgaggtgacctatatcgctgtgcaggccgatttcgccacctggtccgcaacacgcacgcagggcggcttcgacatccgcacctttgccgtcaaagccaaacccacgcaagacgtggaatacatccggccgggtatgagcgtactggtgaactggaaagacatcgccaaataattcagaaagggtagcgtatgccgggctttttcagcaatacgctcgccgtcctgcggcgagagatctaccgggtcgcacgtcagccgatgtattggctgctgacggtgattctgccgatcgtcgcgttcgcattcttcgcggtgttgttatacaagggagtggcacgcgacattccgatcgccgtcgtggaccaggacaacagcaccctctcccgcaaagtgacgcagatgatcgacgcgacgcctacggcttgggtcgcttacggcgtacagggaatggaagaggccgaacgactgatgcttcagggcaaggtcatgggaatcgttctgattcccgatttcttcgaaaagaacattctcaacaacagccagacccatctggaaagctacctgaccggcacgaacattacggtaaacggtctgctggcgaaggatttgcaaacgactgtcaccacttttaccgccggtatccagctgcaactgctgatgaaacaagggctgaccgaaaaacaggctatggcgcaactgatgcccgtacggttcgacaaacatgtgctattcaacccgcatatcaactacggctattacctttcgccgagttttatgccgatgatgcttctgatcttcacgatcatggcgacgattttcgtcatcggaaccgaactcaagaacggcacggccagggagtggtacgacacggccggaggctcggtcttcgcggcctacgcgggcaaaatcctgccgattacggtcattatgttcctgatgtcggaattgatgctcctggtcatcttcaaggtggtcggcgtaccgctgaacggcagcctgacggtcatcaccatcagcaatctgctcttcatcctgagttaccagtccctcggtgcgatgatcgtcaccgtgttgagcaatttgcgcctgtcgctttcgatcggcggcggttactcggtactggccttcacgttttcgggccttacgttcccgattatggctatgagcaaacccatgcaatggttctgctgcatctttccgttcacattctacaccgacatcatggtcgatcaggccctgcgcggtgctccggcgatatactcgttgcccgacatgggcatcatcgccctgttcatcattcttccgctgctgtgtctgccgcgcctgcgcaccatctgcacgaataaaaaatactgggggagattatagcgatgagtcgatttaccaaacagataacctcttactggcagcagttccgcaccgtcgtccgcaacgaatacggctcgatcttcacggatgccggcgtgattctcgtgctggtgctcgccctgctgatctattccacgctctattcgctggcttacgggacgcaggtacttcgtaacgtgccgatcggagtaatcgacatgagcaacacttcgaccagccgtcagttgatcaataccttcaatgccggaccgaacgtctatgtggcctacgaacccggcgacatggacgaggccaaacaccttttctacgaccgggagatatacggcgtggtttacatcccctccgattacgaggaaaaactgctcggcggacagcaggcggtcgtttcgctctatgtcgatgccagctattttctgatgtaccgccaggcgttccaggagctcgtgtcgggcatcggcaccacaggagctatggtggaattccagcggttgatcgcaaaaggagccaacatcccgcaggctacggccacgacgcaacccgtgatttaccaaagccacaatttgttcaatccctatctgggatacggatcgttcgtgatgccggctatcatcatggtcatcattcagcagacgatgctgatcggtatcggtatgatcggaggcacctggagcgaattcggactttacaagaaactcattcctccgggacgccggagaatgtccacgctgcccgtcgtggcaggcaaagcgttcgtttatgcgtcgatctacgccgtcaccctgttttatattttgggactgcactacaaattgtttcatttcccgaccaacggtcacacggcggacatcatcgcctttctcatcccgtatctgctgtcctgtattttcctgggcatcgccgtctcgacgctgttccagcgacgcgaacagtcgatcatgctgttactctggtgttcgatcccggctctgatgctcagcggagcttccgtaccccgcgaagcgatgcccgaatggctctaccggttcggccagattctgccgagcagcagcggggtagaagggttcatccggctccaaagtatgggggcttcgttcagcgacgtgctgcacgaggtacgtatcctgtggattctcacgatagtttacggcggattcgccgctgtcggcatacacctccgcctcaagcaggccgcaggtaaatagcccgattaaaatatgattttctttccaaacatcgaatcaggctatgaaacggcttgtttttactctttttaccgtatttgcggcaacagcgctttgcagcgctcaaaatccgaatgaaacgcgcgttgtcaaagacgctgccggacgcgtgaagtacaccgtccacaaaacagggaatcgggaaataatcaaggattcgaagggaaggatcacaggcacgacacgcgaaacaaaggaacgcaaatattattacaattcaaacggctcgtcggcaggtacagaaacaaaatgggaaccggcaagcagacagcggaaaagtcatcatacggcaagtcctgaatcgaatgaccggaagtaattggatccgggagtgccatttccatcccgaaaggttgtagcgactcgggcaggcatattccgcaacgttatgggcctgatcgcaaaggtgctgaaacaaaaagagggggcaatacccctctttttaatcatatcgtgcaaccgggactcatatcgctttaccggtgcggcggacggaacccgcctccgggagcggtgctgcgccccataccgacggctcccgacgggcggtccgaaacgccttgataatccttgatgttcttcgaacccttcttgccgaagaaccgcaggttatagacgaactgcacacagtaataacgtcccaccacgctgttccaagaattttgggtccaacccgacccggtcgtgcgcacgaacgctttattctgattgaaaatgtcgtttacgccgatgttgatttcccccagctggttgcgaaagaccttcttgcccacgaacaggttgcagagcagatagctgtcgtcgtaatcgttcgtgaaacccagatactggatataagaagcgctgcccgagagggagaacccccggccgaaaatgaacttgaacgacgccgcagcctgatggttgaaataacggttctttcctccggtagcggcgagggaattgacggcttcgttgtacgtgccgtcccacgaaagggtgaagtccacattctcggagatgttgctgcccaacactacgcccgcttcgtaaccgaggttgcccgtgttgttccgctcgccgtccacgaggctcggaatacgcgaatagcttacgccgcctcgcagattcaggttactcttgatgaaattcaccggaaacccgtaacttgcccgtgcccgcacatcccagtagccgtccatattcgtccattcggtgaactgcaacggacggtaaaccgtattgtcgatctccaaagtaggacggtagcgggtgctggtcgtaatatagtcctgggtcgtttcggcccggaacatcagcataaaagtacggcccttctccgcattggaattgacgtagtgcatactcaaattatggctgtacgaaggccgtaagtcgggattaccccgcgtgatgtattgcgcatccgatacgtcatagacattttgcaactgggtaacctccgggttgtccgtataggagcgcaggaacattcgcagcgtattctcccggttcaggttgaactgtcccaccataaaataggtcacattgttgtaggcgtgcttgatctcttcggagccggtacggatcacctcacccgaaaggctcgaacgctgataatagacgttcgcagcgaaagtattgcggtccttggagtagttgaagccggggccgagagagtgcaccgtatagctgctcttgtaagcgttcgacagcaagggatcgggaagcaatcccgtaatatcgtaatcctcgccggtccggtaggttttcttgtcgctctgctggtaattgtacgacgtccgatacccgaggctcacctgcgaatatttggatacgggctccgtataggtcaggcggccgttcagccggtaacggtacgaaggattcatcatgcgctggtagatcagctttttcagatcgttctcgtccggatcaggatcgaggtctgggtaatcctcgtaaataccgaaatcgttggtatgggagttttgcttattctgggagtcgaaatagttgaaaaagccgtccaccgtaagcgtacgtcccggcttgcccagccgcacgcggtaaatggccgaagtattgacgctgtaaccgtttcggaaggcatcctcgaaattgtcgatgacgctgtaaccgctttcgccgaactgtcgcccgtaagtcgtactgaacggatcgttcgactggaaactcaagcccgggcggatcatcagcgactggttgtccgcgattttccattcgatgcgggcattcaggcggttgttgaaattctgtgtccgggaataaccgtcggtgaaaagcgtatcgatcggtgccggatcctcgtaccaacgctcggtacgcgcccgattgaccgtacgggttccgttgaagaagtagctgccctggaaagtcacctgatcccgactgccccaggtatccgaataattgacacccactgcatttaccgaagccacgccgtcctggtgacgaaccatatattgtcccacgccacggccgaagcgaccgccgccatgtcctccgccggaattgcccgtaacacccaaaatatcctcgaacgaaaagttctgctgattgacgttgttaaaaagaccgatcagcgacagacggctggagccgctgaaaaaattgacgttgccgccgaccatatacttgtttttggcttcggtttccgtgtcggcgtcgtaaccgtacccagcatatgccttaccgaatatgccctgacgcatattttcgcgtgtgacgatgttgatcgccttatagctttcgccgtcgtccatacccgaaaactcggcctggtcgctcagcttgttgtaaacctcgatccgttcgaccgcttcggccggcagggacttgatcgccgatgtcacgtcctcgccgaaaaactccttgccatcgacgaatactttctggatcgtttcgccctgcgcctcgacagcgccgttattgaccataatgccgggcatcttcttcaacagcccctcgacgtcggcatcggcagtcaccttgaacgcattggcattatagcttaccgtatcgcccttttgagaagtgcggagtgcctgcacctccttcactacggtctcgatggcgatagccgcctcccgcagtgcgatctttcccaggttttcggacggctgcgtcacccgaaactccttttcggccttttcatatcccatgaaagtcacggccagggtatatgaaccataagcgaggccgcgcacttgcaatgcgcctttgtaacccgatgtataatatttcttctgatcggggtgggctttgggcacgatttctatcacggcacccggtacctcttctcccgtttcggcatctaccacggtgagcgtaatcacaccgctctgggcctgcgcccgagccaaacctatcgtacacaaaaatacaagtaaacaaattgctctaatcatctcccatcattgtcgtcacacggcaaatatacgataaaaatcgacttttttcactgtccggaacatgaaaaaaggatgaaacaggtcggcctgtttcatccctataaacggaaatatcggcgaattatttcgactttccgcctactttttatccacacacggagcaccgttgcagggtctgcggtgatgtccgggattcgcatcgccttttcgacatgccggtccggcgcaatcgacctttcgggcgggacactctcggcattcgatccattgggcatactgttcgggcgtcagaaccgccttcatccggccggccatctgttcacgctgctgtgccatcgcttcacgcgatttttcagccatctcccggcgttcggcccggtgctccctcatggcttgagcctgttccaggcaaatagggtaaacctgttttacctgttcgtcagagagcgacaggttttctttcatccggtcggtcatctttttcgcaacctgctccgtagtaagttctttgtgttcggcacgacgattatggtgtcccttctgggcccataccgtacccgttgccagcaccagcgctgccagtacgacgatcaagaatttcgctttcatatcaactaccattttaattgttatcggtctttataaccgaatgtactcttgcaaaccaagcgccaatctcttccgacaaatggaaaaaacgacttattcctccttaaaccacgaagcatacagttggtaatcacgggctgtacgcagtacgatctcgtcccgttgttccggggttatctccttgacttttttggccggaatacccgcatagaccgaattgggttcgagcttgctgcccgaaagcaccagtgcgttggccgcgacgatgcacccggacgctactacggcattgtccaacaccgtagcccccataccgatcaggcagttgtcttcgatgatcgcgccgtgaattacggcgttatgtcccaccgacacgtcgttgccgatatgggtctgcgacgggtgcttcgagccgtcgaacagggtgtggatcaccacgccgtcctggatgttcgtccgatcgccgatggtgatcgtgttcacatcgccgcgtaacacggcgttgtaccagatcgaacagtcgcggcccaccgtcacgtcgccgacaagcacggcggtttccgccaaaaacgtattttcacccacctgcggggtatgtccccgtatctctctgatatatgccataattcgatatgtattagttggttcttactctttttcagccgccgcatgcttggcttgctgccacaactcttccatccgatcgagcgacagctcgtgcagggtatgcccctcggacgaagcacactcttccatataattaaaccgattcatgaactttttattgcttcgctcgagtgcggattcggggtcgatcccgtacaggcggcaagcattcaccagggcgaacagcaggtcgccgaactcctcctccatcgccgtacggtcaccggatatcatttcggcttcgacctcggcggtttcctccttcaccttggcccaaacatcctcttttttctcccagtcgaaccccgtcgccgctgctttctcaccgatgcggtaggccttcaccaatgcaggcaggctcacgggaacacctcccaacgtaccgctccgacggtttttcttacgcagtttcaatgcctcccagttggctttgacctcttccggagtatcggcatgcacctccccgtaaatgtgaggatggcgatagaccagcttgtcgcacaaagcgttcaccacatcggcataatcgaacgccccggcctcctcgcccagcttggcatagaaaaccacgtgcaacagcaagtcgccggcctcttccttgataccgtcgagatccttgttcaggatggcgtcggccaattcgtacgtctcctcgatcgtgttgtttcggagtgtttcgaaggtctgtttgcgatcccagggacactgttcgcgcagcgtatccataatttccaacaggcgggccgtcgccttcagtttgtcttgtttcatcgtattgtttctgtattttgaccgataacgaagcgaatatccgcaatccaagcgaacaccttttttccatatctttatgatcggataacagtccgaattcgcccgaggcgatccgagccacagccgattttgtgcaaagatagtgaaagccgagagaaaatgggagcttgttcccatttttccgagacgcatcctatctaagactatgtcaaagatagtgaaagatgagagcaatcgtgcggactcgtgccgaatcattgttttttgattgcgaaattcttaaaaaagatcgcgcctttcggaaaaaaccttaactttgttaaagtacctcgcaccggcgaaacgacacttttattcgcttggcagctcataggctgccgaacggcaagagatcgttttcgataatttttcggttgctacgaatggagccaaaagatttatgttatgaaaaaaatcgtcgtattcctgctgcttgtttcaagtcttttcccttcgggctgcacccggccgaaacagtacgccgactattcgcggcactcgtgtttcgaccgtacggagatcgacagcgctacgctgcgaaacctcgaagtattgggccgtgtgtgggggttcgtgaaatatcaccatccggcattttcggacgaccggtacgacttggatttcgaacttttcgagttgctgcctctggtcgccgataccgctcctgccgctcgcaatgagatattggcccagtggatcgacggcttcggcaggtacaaaacagcatccgaaaaatacgagaagatactggcgtcggattcggtttttgaacaccgcaccgacatcggatggattcgggatacggcaacgctcggccgcgagctttcggagcgtctggtccggctgcgttctgccgaccgaaccgcagggaaccgttacgtgtcgcaaacgtattacgaaacctatgaccaatggtcccccaatccctgtttcgacggagaaaaaccctattacgacttgtcgaatcccgactacggctatcgcctgctcacggtattccgtttctggaacatggtcgaatatttctttccaagtaaatacttgaccgacaaggactggaacgatgttcttcccgaatatatccggcgtatggcacacccgacgggcagttacctgcgggaaacgcgacggatgatcgcggaactcgacgacaaccacgcacaatacggcggaggaatcttcgaattgttcggccgttatcgagtccctctcaacacaggcttcgtcgaagggcggctcatcgtcgtaacgcccgataccgtcccggtgaagagcgagcggaaagccccctttcaggtgggggacgaaatcgtcgctgtcgaagataaaccggtcgaatattacatggcacaaaccagggaattcatttcctgctccaacgggaacgacgtgctggcagctacggccgatcaaattctgcgcactaaagagaatcggccgctatcgatccgctaccgccgtgacggagtgacgagggacacattggccgacgtaacaaagatgccaggacatttcagttggaattacctttggaaataccacaggacattctcgatgctcgaagattcgatcggatatatctgtccggacaaactctcgaaagaggagatacctgagatctcaaacggcctgaaaaaaaccagagggttgattatcgatttacgctattatccttcacaagattttaatgaatttgtaagccagtacatcgttccggacgatgttaaatatacggtccgatttacttaccccgatcttgcattgccgggagtattttacgcgagagactattcttatccgacatataaaacagaaaaatacaacgcccctatcattataatggttaatgaagggacgcaaagttacggagaaacatccgtacaaaaaatccaaaataatccatatactataacgatcggttctcaaagcgccggagccaacggcaatatcagcaaatttacgttacctcggggaatactcggcgcattttccgggttagggtggtattatcccgacggatgggtggtgaatcggcagggcgtgaagatcgaccacgaaatacggccgaccctcgaaggtatccgggatggacgggacgaaatgttggaggcagcactgagcctaatcgaagagaagaccgaagaagagtaggcagagccggacacaggatgcgaaacggcgctgcgggtattcaatccgcagcgccgttttgaaatattcgtccccgttccgcccgaacttcggaaattactccaccggttcgtaatcgatcgaggagtcctggtccgtacgttcgatcttcatgattaccgggcggagtccgtcgttgcaggaacagatcgccacgccttccttcgtgatccaatcgccgaaatagaactttccggcgccgtgcgacaaggcgaacacatactgataaaccgccttccacgcttcgtcgcaaaaaccttcgggcttggcatagtcggcataaaaaacctgaccttcacgcatcataggacacctcgtaaagccgggagcggcatactctcgtgccaattcctcgttcagtgtccgttgcaggatcgtaattttacagcgcttcataatatcgtctttcgctcagaacccattctgcggggggactgacttgccgcccgcagacaggcgtttcaaaaatcaagcccgcacctgcgcacccgccttgcgttcgaactgagccgtcagattggccatcgcctgctcgatcatcttgtcggtcagcgtctgggtcttgtcctccagtacgaaactcagggcatacgattttttaccttcgggcagcttatcgccctcataaacatcgaagagcgaaacccgtttgagcaacttgcgttcggccgcgaaagcaatatcacgcagtgcggagaaagtcacctccttgtcgatcagcagcgccaaatcgcgttttacctccgggaacttggaaagctctttggccgtgaccttattcttacgcgtagccttgatcagggccccgaaatccatctccagataataaacgtcctgtttcagatcgaaagccttgcgcagcttcgacgaaacgacacccatctgtaccaattctctggccttgtcgttgagcgagaaggagagtgcatccccgtaaagatcgctgcggagcgattcggacttgagcgtataaaggtctagcccgaaacgacgcaacagcttctcggcaatcgctcgcagcgtaaagaacgatgcctgctccggtttccggttccacgaaagaggcgcagcgatgccggttacggcgatcgccaggcggaactgctcggaataagccttcagcggctcttccggcatagcggccgtcgcatcgtaaaaatagcagttgccgaactcgtacagcttcaggtcgccattgcggtggttggcattcaactgcacggcttcgagcatattgaaaagcagcgtctgtcgcatgacgttcagatcgttgctgagcggattgagtatcttcacgcaatgctccggcttgtaagaggtgagaccctcgtaataagccgctttcgtcagcgaattggacatgatctccgtaaagccgttagccgtcaggaaatcggcggcgaggttcatcagcttgttccggtcgggtttcggcgcgtaggagagcgccgaattgacgtgcgagggaacagggatgttattgtagccgtagatgcggagaatctcctcgaccaaatcggcctcgcgcgtcacatcgacccgatagggcggcacggccacgcgccataggtcaccttcctcggcctcgattttaatgtcgagcgcaccgagaatcgtgcggatcgtatcggcaggaatctctttgccgatcagacgattgacacgctttatatcgagttccactttgaacttttcgataggagcggagcaaatatccgtaatttcggaggcgatctctcctccggccagctccttcatcagcagggcggcacgcttgagggcatagacctgtatgtcgggatccacgccgcgctcgaagcggaacgaagaatcggtgttcaggccgaagcgcttggccgtcttgcgcacccagaccgggttgaaataggcgctctcgatgaatacgtcggtcgtcgtatcgctcacgcccgaatccaatccgccgtaaacgcccgcaatacacatgggtttcgcagccgagcagatcatcaggtcgttggccgtgagcttgcgctctacgccgtcgagcgtcacgaacggagtaccttcctcgcaggttctgaccacgatccggccgccgtcgatcttcgctgcatcgaaagcgtgcaggggctgtcccagctcgaaaagcacgaaattggtgatgtccaccaggttgtttttgggggtaatgcccgctgtccgcaggcagttctgcatccattcgggcgaagggcctatcttacaattcttgaccgtaacacccgcatagcgcggtgcggcttcgctgtttttcacttgcacatcgatcttcagatcgcggttatcgacggcgaaagcgctcacgtcgggccattgcagttcgacgggcttgccctggcttttgagataggccgccagatcacgtgccacgccgatatgcgacgccgcatcgatgcggttgggagtcagaccgatgccgatgacatagtcgtcttccagcttcagatactcccgggccggctggccgactttcgcgtcggccggcagctccataatgccctcatgcgaagctccgatacccagttcgtcctcggcacagagcatgccgagcgactccacgccccggatcttgctccgcttgatcttgaactcctcctcgccgccgttagggtagagcaccgcacctaccgtagcgcagaggaccttgagaccctgccgacagttgggagcaccgcagacgatctgcaacggagcctcgccgcctacatccacggtcgtcaggtgcagatggtccgaatcgggatgatccgtgcaggtcagcacctcgccgaccacgacgcccgcaagtccgccgcgaatcgattcgatcttttcgaagctctcgacctccaggccgatatcggtgaggatcgtcgccatttcttcggccgacagatcggttttaaggtagcgtttcagccagttataggagatattcatagtatgtgtaatattttattattgacaaagagtaagcaaaggtataaaaatatcccgattttatccccgcaaaagagcggtaattacgaagacggccagcaccgtgctcgcaatgccgttgagcgtgccgaaagcgatgccgatattccgctgccgtgtcggggtcaccaacaggtgttcggcgacgaggatcagcgtgaaaagcccttcgccgagccacagccagccgttctgggggcaaaacgatccgaaccagaaaagcgccgcgacgctcacggcgtgcaacaaaatactgaacaggagcgacacccgtgccgaaaaacgggccgggatggagtaaaggccgttcttgcggtcgaaatcggcgtcctgcaacgcatagatgatgtcgaagccaccgcaccaggtcatcaccagcagcgccaggatacagggcggccatgcgaaatgtcccgtgacggcaatgtacgcccccaccggagcaatacccagccccagaccgagcaccagatgcgccagcgcggtgaaccgtttgcaataactatatatcaatataacgaatagtgccacaggcgataataatccggtaagtaaattgatagtcgaggcggtgacaacgaacagcagcgcattgacgatcacgaaacggagcgctgcccgggcactgatctttccggccggaatttctcggtcggccgtgcggggattggccttgtcgatgcggcggtcggcccagcggttgaagcccatcgcggcgttgcgggcgaagaccatgcagagcaacacctgcaagagcagcaccacccagccgtacctgcccgaacagtccgaagagatcccctcggtacgcagcgcataaacgaacccgacgagggcgaaaggcatggcgaaaatcgtatgggcgaacttgaccagtccggcatattgacgtatcattgtcgattcgattttatggtcgcaaaagtaatcatttttttcggcagcagaatacgaccagggcaagaaatcagcccccgacaacgcctgaaatccattgtttttctccggaaagatattatctttgcacattattatataaggatttcactcgacaatgaaaaacatacgcaatttttgcatcatagcccacatcgaccacggcaaatcgacactggccgaccgcctgctggaaaagaccaatacgctcaaccagcgggaaatgcaggcccaggtcctggacaacatggacttggagcgcgaaaagggcatcaccatcaagagccatgcgatccagatggaatacctggcccgcaacggcgaaaaatacgtgctcaacctgatcgacactccgggccacgtggacttttcctatgaggtatcgcgtgccatcgcctcgtgcgaaggggctctgctcgtagtcgatgccacgcagggtatccaggcgcagaccatatcgaacctttacctggctgtcgagcacgacctgaagatcattcccgtactgaacaagatcgacatggactcggcgatgatcgacgaagtgaaggatcaggtagtcgatctgctgggttgtgacccggacgagatcctctgcgcctccggcaaaacgggactgggcgtggaagaggtgctcgaagccatcgtcgagcggattccggagcctcagggcgatgcgaacgctccgttgcaggcattgatcttcgactcggtgttcaaccccttccggggcatcatcgcctatttccgcgtcttcaacggcacgatccgcaagggcgagcatgtcaaattcttcaacacgggcagcgagtacgacgccgacgaggtgggcgtgctgaagctcaagatgcagccccgcgacgaaatccgtgccggggacgtgggctatatctgttcgggtatcaaaacttcgtcggacgtcaaggtgggcgatacgatcacttcggtcgaaaacccctcgacggaggccatcgccggtttcgaggatgtgaaaccgatggtcttcgcgggcgtctatcccgtcgaagccgaccagtacgaagacctgcgggcttcgctcgaaaaattgcagctcaacgatgcctcgctcacgttcgagcccgaaagttcgctggcgctgggcttcggcttccgctgcggatttctcggcctgctgcacatggagatcatccaggaacgcctctaccgcgaattcgacatggacgtcatcacgaccgtcccgaacgtatcctataaaatcaccacgacgcagggcgacgtgctcgaggtgcacaacccctcgggcctgcccgaaataaccaaaatcgcctcgatcgaggagccttatatcctggctcaaatcatcaccaagtcggatttcctgggcaacgtgctcaagctctgcatcgacaagcggggtatcatgaaaaaccagaccttcatcacgcaggatcgcgtggaggtcaatttcgagatgcccctgtcggaaatcgtgttcgacttctacgacaagctcaagagcatttccaagggctacgcctcgttcgactaccaccgcatcgggttccgtccgagcaagctggccaaactggacatcctgctcaacggcgaaccggtcgatgccctttcgtcgctgatctatgccgaccacgcctacgatttcggacgcagaatgtgcgagaagctcaaggagctgatcccgcgccaacagttcgacatcgccatccaggcagccatcggcgccaagatcatcgcccgcgaaacggtcaaggccgtgcgcaaggacgtgacggccaagtgctacggcggcgacatctcccgaaagcgcaagttgctggaaaagcagaaaaagggcaagaaacgcatgcgtcagatcggcaatgtcgaagtaccccagtcggcctttctcgccgtattgaaaatggattagctatgaaaaagacgattatcgacctgttcgaatcctccgttgaaaaatacggaaagaaaaccttcctgctcgagaagcgtcatcacgcctttcagcccacgacttacgcggaaaccagggaacaggccctggaagtgggggccggattagcttcgctgggcatccgccccaaagacaaggtcgctatcctggccgaaggaagcaacggatggatcatctccgagctgggtatcttctatgccggagcgatcagcgttccgctgtcggtcaaactcgaagagtcgaacgatctgttgttccggctccgccacgccgaggtcaaggcgctgttcgtttcgaaacaacagcttccgaagatccgccgcatccgggcggaactgccggaactcgaacagatcatcgtcctgggacacattccgctcgaaagcggcgaaacggcctacggcatgctcaaacgtctgggccgcgactatttggccgggcataaggaggaatttctcaaaatagggcaggcaatccggaacgacgactacgccacgatcacctacacgtcgggcacgacggccgatccgaaaggcgtcgtcctgacccaccgcaactacacggccaacgtcgaacagtcgctctcgcgcatcgacatcccgtccagctaccgcacgctcatcatcctgccgctggaccactgtttcgcgcacgtggtgggattctacatcatgatcgcctgcggcgccagcgtggcgaccgtacaaataggggcgaccccgatggagacactcaagaatattccgcagaatatccgcgaagtgaaacccaacttcctgctgtcggtgccggcactggccaaaaatttccgcaaaaacatcgaaacttcgattcgggccaaaggacctttcactgaacggttgttcgacttcgcgctccgcacggcctatatctacaatcaggacggctaccacaagggcaagggctggcggatcctgctggcacccgtcgtgggacttttcgacctcgtgctgttccgcaaggtgcgggaggcattcggcggcagcctggagtttttcgtcgggggcggcgcactgctcgattcggagctgcaacgctttttctatgccatcgggatcccgatgttccagggatacggactttcggaagctacacccgtcatttcgaccaattcgcccaagtaccactggcacaagttcggatcgtcgggcaagattctcgaaccgctcgacctgaaaatccttgacgaagaggggcgagagctgccgcgcggccaaaagggtgaaatcgtcatccggggcgagaacgtcatggccggctactggaaaaatcccgatgcgacggcggcgaccgtccgcaacggctggctccacacgggcgatatgggctatgtgtcggaggatgatttcctctacgtattggggcgcttcaagagcctgctgatcgccagcgacggagagaagtacagccccgaaggaatggaggaggcgatcgtcgataagtcgcccttcatcgaccagatcattatctataacaaccaaagtcccttcaccggggcgatcgtcgtacccaatcgcgacgccctgcgccgcgagctcgacgcccgcgatatccgggagggtagagcggctgcggccgccgacatcctcggtgcggagatcgaccgttaccgggccggcggcccctatgccggagaatttcccgagcggtggcttccggcgggactggctatcgtggacgagccattcaccgagcaaaacggactgatcaacagtacgatgaaaatcgtccgcaacaaggtggaagagtatttccgcgaccggatcgactacctctatactccggagggaagggagttgcgaaacgataaaaaccttgcgtcactgcggaaaatggtagaataacctgaaattttaccgcccgaagagttgataaataaaaaaatcggagtaactttgttctccgaatgcgggagtagctcagtggtagagcatcagcttcccaagctgagggtcgcgggttcgagccccgtttcccgctcacgaggtccttttcgaaggaccttttttgttaggcaagattacataatatagaagtaaacgattctggacatcaatgatatgcagaatcgtttcgttttaataccggaacaaagagcgaacagcagcgaaagtacgattatcaggatcgccccctgaaagttccaaaaacagtcagccttattttcctttatccatctgcttctccagcaaagaaattacccggttcatctgctcgtcccgctccttgaaactgtcggcctgcttttttattacctcccaagcatccctgggaatcaacacttcatcggagcctgccggtcgcccgacataatactcctggtcgtttaccaaaagctcattcccgccttccattgccggatagtgaacgacattcagcatcggtccttcaccgttcaacagccaatctttattcaattcgggatagcgggcgaaaattttaccgagtttatcacggctcggttcatgtttcagtttcgacagataggcattcgatagtccgcactcgcgttcgaagcgccccggcttgatgccgctcatcctacaaaattccattattctgtccttgaccgtcataccaaaagtagtttataataaaaaccgtatttataaaaataaattatagaaaattcctcgacatacagatttaattcttcgaatattatctatacttatagtatcaaacagatcgaacgaatagtgttcgaaaaaccgaacgaaaaaaattataacaaatataatatcattctttcgataatgcgacgacaagtatataaaaaggtaatcgaaatcgcacccgatctgaaacgacagatcgctatggaaatggggtgcacggtagataccgtgtataatgcgctcaacttgagcaacccgaccacgggtgcacaaccggacaggatccgccgtcgggctatggaattgggcggcaaggagaaccgaaaaatccgctggatcaattattgacgccccaacctctcgtgcgaacgaaaacagccggaaaaaagaggtcgtattacaaaccgcaacgaagtcttccaccacatcgtgcttccgcacaatgctttgcgcgaataacgctcaccgacaaaaaacggggagcaatcgggagaggcggaataagtagaaatacaaagaggaaacgggagattttcccgtttcctctaattttctataaacgccccgccgacggaaacttacctccaaatccgaacgcatagccggaaggatgaattaaaaaaacgaacatccttccgaaatttttcctatatttgcatcatacataagacacaagaggggtgccttcgtcgggaaagaccggaaaggctgagatcataccctatgaacctgatgcggtcagtaccgccggaggaacttgttcatagaccgtaattttctcgtcgaagcatctccgcaattacggtaaatcatggaagtattcatcaatcactcacccgtcgaaaccgacgcagcaacgacgcttgccgaactgctgatgcaggagggtatcgctgccgacggaatcgcagttgcgatcgccaacaaggtcgtgccccgcagcgaatggccgacgacccgcttgcaggccggaacgaaaatcactgtcatacgcgccgtgtgcggaggatgatgcgtatcatcgtcatcaccgacacgtcgttcgccgcatcggaagcggagtcgattcggattctgcttttggaaggagccgatcgggtgcatctgcgtaaaccgcaatcggccgaagccgacatgcgccgtctgatcgaagcgctgccaccggaattatatcctcgtctgactttgcaggatcatttgcagctggccaaagagtacggcatcggaggagtacacctgaacgcccgcaacccggagatccccgccggattcgggggactgataagccgctcgtgccactcgttcggcgagatcgcatcgcacccgacggaagactacctttttctcagcccgattttcgacagcatctccaaaaccggctaccgagcagggtacgcaccggacgaactccgaaaggcattcgcgcagggcatcatcaatccgcgcgtcgcagcgctcggcggcatccggccggaacacctgcccgcgttacaggagtacggattcgggggagcggcctttctcgggtacatctggcagggcgctacgcccggagaactggtgcggcgcatgctggaaatacgaaaattcaaccgataaaccggcggagcgcaccggaatcggtccgataaaaatactttagtgtgcctcttgggaggcgcagcgtcccaaaatcccatccgaggaggaggggcggggaaggtcggaattacagaatcggccacgagccgcgataatcgaccgccggttcgaggctgcgaccgtcagataacaggcccattgaatatgttattatttgaaattatgttacagttcattacccaccacaccgaccgctacgacgaaatcgccggaacacgggccgtactcgaaggaggctgccgctgggtgcagctccgcatgaaagacgctccggcggaagaggtgctgcgcataggacgtgaaatcgaaaagctgtgccgggagtacggcgcgaaattcatcctcgacgatcacgtggaactcgtccgcgaactgaatgccgacggtgtgcatctgggcaagctcgacacgcctgttgccgaagcacgccgtatcctgggaccggaatacctgatcggagcgacggccaacaccttcgaagacatcgaacggggggcagggcagggcgccgactacatcggtctcgggccgttccgcttcacgcagaccaaacgcaacttgagtcccgtactcggactcgaaggctaccgcacgattatggagcgctgccgcaatgccggcattgcgctgcccgtcgtcgccatcggaggcattacggccgccgacgtggaagatattcttgcgacgggagtaaccggcatagcactctcgggcgcattgctgcaagcggaaaacaccctcgaagaaactcaacgaataattaagataataaacagaatcaaacaatgagtgaattagttatcggcggacggacgttccgttcacgcctgttcgtagggacaggaaaattcagctccaacgaactgatggcccgcgcaatcgccgcctcggaatcggagatggtcaccgtagcgatgaagcgcatcgacatgaacaacccgcaggacgacatgctcgcgcatgtacgccgtccggagattcaactgctgcccaatacgtcgggtgtgcgcgacgccgaggaggccgtgctcgcggcacagctcgcccgcgaagcgttcggcacgaacttcatcaagctggagatccatcccgatcccaaatacctgctgcccgatccggtcgaaacgctcaaggcaaccgaacagttggctaaaatgggcttcgtggtactgccgtacattcaggccgatccggtgctttgcaagcgactcgaagaggcgggcgccgcgaccgtaatgccgctggcggcaccgatcggcaccaacaagggactggttacgcgcgacctgctggccatcatcatcgaacagagcaacgtcccggtcatcgtggacgcaggattaggcgccccgtcccatgcggcggcggcgatggagatgggtgccgacgccgtactcgtgaatacggccatcgccgtcgcaggcgatcccgtgcgcatggcccgcgccttcgcccaggccgtcgttgccgggcgcgaagcctacgaagccggactcggagcacaggcacagtgcgccgaagcgtcgagccctctcaccgcatttctcgactaattccgccgcgctatgttttcagaagaattagccaaatacgactgggaggagacgacccggcaaattcagcacaaacgaccggcagacgtagagacggcgctcggcaaggaacacctgaccctcgacgacttcatggcgctcatctcacctgcagcggccgcctacctggaaccgatggcccggctgagccgccgatacacacaggaacggttcggcaagactatttcgatgtatattccgatgtatatcaccaactcgtgcacgaactcctgcatctactgcggattcaaccatcataacaaattcgaccgcgtgatcctcacgatggaacagatcgaagacgagtgcaaggcgatccgggcactcggaccgttcgaaaacctgctgctcgtaacgggagaaaatccccgggcagcgggcgtggattacatcgaacaggcgctcaaggtctgccgtccctatttcaacaacctcaccatcgaggtaatgccgttggcgagcgaggattactaccgcctgacccaatccggactcaacggggtggtctgctttcaggagacctacaaccgcgccaactacaacatctaccacccggcggggatgaaatccaaattcgaatggcgcgtgaacggcttcgaccgcatggggcaggccggggtgcacaagatcggcatgggcgtactgatcggcctcgaagagtggcgcacggacgtgacgatgatggccctgcatctgcaatacctgcgcaagcactactggaaaacgcgctacagcgtcaatttcccgcgcatgtgtccgtcggaagggcattttcagccgaatgtggtgatgaccgaccgggagctggcccaactcactttcgccttccgcatcttcgatcacgacgtggacatctccttctcgacccgtgaaaaaccctcgttccgcaaccacatcgccacgctcggagcgacatcgatgagcgccggatcgaaaaccgatccgggcggctaccatacctatccccagtccctcgaacagttctccgtcagcgacgaacgcacaccggcccaggtcgaagccgacatccgccgcgaagggtacgaagtcgtctggaaagactgggacaaaatcttcgactgacgatggaggaacgttacgcacggcagacgatgctgccggaaataggggagcaggggcagcgcaggttgtcagaggcttcggtgctgatcgtcggcatcggcgggctcggctcggccgcagccctctacctgacgggagccggcgtgggacgcatcggactggccgatgcggatacggtgagcaagagcaacctccaacggcaggtactctacaccgaacgacagatcggaatgcccaagagcgctgcggcccgggagcggctcgcggcgctctcgtcccacaccgcgttcgaatgccggccggaaggaattaccccggaaaacgcacggcctattctggacggttacgacctgatactcgactgctgcgacaactttccgacccgttacctgctcgacgacctatgtgccgcctgccgaaaaccctgggtgcacggctcgatcggggagttttacggtcaggtgaccgttttcaacggccggaaaggccgtcgttaccgcgatctctatcccgaccggaaggcactttgcgcccgtccccggatcacgcagggcgtactcggcacagtgccgggcgtcatcggaacgctgcaagcttccgaggcgatcaaatacctctgcggcttcggcgagccgctcgacgggcgactgttcacgatcgacctgcgtaccctgcaaacccaaatcatagattattaacctgcaaaaaacacaaaaagaacctatgggaaaaggatttgacgaatatgctccggcttacgacgcctggttcctcgaaaaccgcaacgtactctactcggaaatcaatctggtggcccacgtgctgaaaaatccggggcggacactctcggtcggttgcggcagcggactcttcgaaacgattctggccaaagagtacggtatcacgatcaccgacggcatcgaaccgtcggaaggaatggccgaaatcgcccgcaagcgggggatgaaggtgacgatctcgaccgccgaagaagccgatttcggctgcggcgactacgatacgattctcttcaacggtacccccagctacatcaccgatctggaaagcgtcgtccgcaaagcctacgacgccctgcccgaaggcggccggatcatcctgatcgacgttccgaaagagagcacctacggtgtgctgtacaacctggccaaagccctcggcacgtgggatcatccgctgctcgcagggacctatcccgagaatccctatccgatcgaattcgtccgggtcgccaactggcgcacgacggccgagaagatcgagctgctcgaaaaagccggattccgggatctccgcttcgcccagaccctcaccacgcacccgctctactcgaaccggcaggaagagcagccgtcggaagggtacgaaaagggagattacgtagccgttaccgcctgcaaataaaccgacattatgaaaaaatggagcgaagaggcctgggatgttgctcggcctacctacctgaaaatcatcgaacatccgttcgtcgaagagcttgcccggggtacgttggccgccgacaagttcctgttctacctgcggcaggattcgctgtatctggcgcattactccagggtattgacccacatcgcttcccgtcttaccgagaaggagcacatcgcggctttcatccgcttcgcttcggacggcatagaggtcgaggaggcgctgcacggctccttcctgaaaggcgacgtaccggctcccgaagagatcagcccgacatgcctgctctacacctcggtactgcaagcccaggccacagccccggtcgaagtggaagccgctgccgtgcttccctgcttctgggtctatcagcaggtcgggcggcagatcatcgcccggcagcagggaagtgggaatccctatgcacagtggatcgagacctacgccgatccctccttcaccgaagcgacttcgcaggctatcggaatctgcgacgcactggccgaaaaaaccgggccggaaacccggcgccggatgaccgacatcttcctgcgctgtaccaagatggagtggctgttctgggacagcgcctggtatctggaaagttggaaaatataaaaagcgttcattcaagtaaatgtgccaataatctgattaacaaaatcaattatgaaaaaacactataagcgggtcctgacgatcgccggaagcgatccgagcggcggagcaggcattcaggccgacctgaaaaccttctcggcctgcggttgttacgggatgtcggccatcgtagccgtcgtggatgaaaatacggtaggcgtcacgggcgtacacccggtgcctgtggatttcgtcaccggccaaatccggtcggtgctggatgacatcggcgccgacgccgttaagatcggtatgctgcactcatcggaacttatccgggccgtgcgggaaactttggccgcttacgacatccgcaacatcgtcctcgatccggtgatggtcgccacctccggcgatcggctcctgcaggaagaagcgatcgccacgctccaagaagagctggtaccgtttgtgcgggtcatcactccgaatatccccgaagcggagattctgctcggacgcaagatcgccggacaggaggagctgccgcaggtagcacgcgaactctccttcggacgcaaagtttccgtgttgctcaaagccggacacctgcacgataccgagcttatcgacgtattctacaacgccgaaaccgacaaagcgacccctctgcgctccatgcggctcgacacgcctaacacgcacggtacgggctgcacgctctcctcggccgtagcagcttttctcgcccatggattgcctctggacgaagcggtcgtctgcgccaaggagtacatcaatgccgcaatcatcgccggagccgaatacgaaatcggcaagggtcacggccctgtgcaccatttcttcaacttctgggaataagagcggggcagtacaccgaaacggcggaaatattgtgcgaagtggggatattttatgaaaatatccctatttttgcttattcaaacaatgtacaaaacacgaagagatatgtcaatggttttcaaattccgaatgttgagcgatgaaaacgaccatttcgtccgcgactacgaggtgccgtacgatatgacgctgctcgggtttcatgagttcatcacgcgttcgcttggctatgaagaggggatgtcttcgttcttcacggccgacaagcagtggaaccggttgcgcgaattcacgctgatggacatgggagataattcagaggacgctcctctgccgatggcggacataacgctcggtcagttgattcacaacaatcgcgaccggctgatctaccagttcgacctcatgggcgaccgggcgtactacctcgaactgaccgaagccaaaaagccggagcaagggatggaatatccgcgcgtagctttcgagcacgccccggctcccgatcagttcgatcccgacgccaatgagtcggaaggctctattttcgaggagatgatgggcgacttcagttcgttcgaaggcgacgacaattacagcgacgatgactgacaagcggctcgtcgttttggtcggcgcaacggggtcgggtaaaacggatctgagcattcgcctggcaaagcattaccgggcgccgatcctttcgaccgattcccggcaagtgtataggggaatgccgatcggtacagcacagcccacgaatgaacaattaaaagccattgaacaccattttattgccacactcgacatacagcaggacttcaactgtgggcaatacgaagtgcaggcgctcgaactgcttcggcaactgttcgtacggcacgatacggtaatcgcggtcggaggatcgggattgtatgtgaaggctctttgcgaggggatggacgacctgccggaagccgacccggaattgcggagaacactccgacagcgacttgcgaatgaaggcctcgaatcgctgggcgaagagttgaagcggctcgatccggtttattatgcgcaggtcgatcggagcaatcctgcacgtgtcgtgcgggcattggaggtatgtctgcaaaccggacgtccctattcggaacagcggacaaagccccgacgcgaacggaacttccgaatccttaaaatcggaaccgacgttccccgtgccgaactctacgggcgaatcgatcgccgcgtggacgaaatgctggcagaaggactggaggtcgaagcccgtcggctctatccctacaaacacctgaacgccctgcaaacggtagggtataaggagttgttcgcctacttcgacggacgatgcagccgcgacgaggcagtggagcttatcaaacgaaacacgcgccgctacgccaaacggcagctcacctggttccgccgcgacccggaaatcttctggaccccacccggcgacactgataaaatcatagcatatatcgacgggacgttgtaaatcagtaaatttttgttacttttgtcccgtctttttccgaagacggctgctcggatggtggaataggtagacacgccggacttaaaatcctgtggccagcaatggccgtgcgggttcgattcccgctccgagtacggaccgaccgctaatcgcaagattagcggtcggttttattttcacagaccacaatctgacgtcatacagagagcgatacgttttcgaccgggtttcaactttcaaacgattgccgaccgtacgataaattttcggacaacaacaaccttgttttaacttttaataaggaaaagcgatatactaccaacctatatctaccgggaaatagattttagcccttgccatatttatttagaagcaagaaatttgcaattaaaaatatttagctatctttgccacacaatccgacaaccgatcatccgatcggtttcatcacccacttaatatatccaacattttattcggacaaatatgcaagaccttaaagcacttgaaggcaagagtctggctgaattgcgtgaaataggtaaggcactgggaatccctcaccttatgatgaaaaaaaaggaccttatcgaaaaaattctgaatttcacgcaggacggaggcgttgcggataccgaaacgcaacaaagccccgccgaagctcccaagaaaacccgtcggccgcgtattgccaagacggaatccgctcaggcctccgtcgaaatacgggagcaacccgccgcacagaccacgacgacaccgactcccgcagcgacaaaagagagcggtaaacgacgcggcaggcccccccgtaaggtgcaggccgccctttcggtggcagccaccgatataccccaaacagagctaataaaaatcccccgggaagaagaacccgtccgggaaatacacgaagaacaaccgccgcttcccgcaacacgtccggcagaggaggtcattaccaaagacgattttgcgggagaaatcgccggtgaaggtgttctggaggtaatgccggacggctacgggttcctgcgctcggcagactacaactacttgaactccccggacgacatctacgtttctccttcacagatcaagctcttcggactgaaggcgggcgacacggtgaccggcacgatccgcccgcccaaagagggcgagaagtatttcccgctggtgcgcgtgacggacatcaacggactggaaccggagtacatccgcgaccgcgtacagttcgaattcatgaccccgcttttcccgagcgaaaaattctgtctcacgggcaacggccacaacaacctctcgtgccgcatcgtggatctcttctcgccgatcggcaaggggcagcgtgcgctgatcgtcgcccagcccaagaccggtaaaacggtgctcatgcagtcgatcgccaacgccatcgccgacaatcatccggaagtctatatgatcgtactgctgatcgacgagcgtccggaggaggtaaccgaaatggcacgcaacgtaaaggccgaagtcgtggcttcgaccttcgacgaacaggcttcgcgtcacgtcaaggtagccgaaatggtgctcgaaaaagccaagcgcatggtcgaatgcggacacgacgtggtgatattcctcgattcgatcactcgcctggcacgcgcctacaactcggtgcagcccgcttcgggcaaggtgctctcgggcggtgtggatgccaacgcgctgcacaaaccgaagcgtttcttcggcgcggcccgcaacacggaagagaaaggctcgctgacaatcatcgccacagccctgatcgacaccggttcgaagatggacgaggtgatcttcgaagagttcaaaggcacgggtaacatggagcttcagctcgaccgcaagctggccaacaagcgcatatatccggccgtcgatgtaatcgcgtcgggtacccgccgcgaagacctgctgctgtcgcgcgaagtgatgaaccgcacgtggattctgcgcaagtatctctcggacatgaccccggtggaagcgatggagttcctgcaaaaacagatgaacctcacggacaacaacgaggagtttctcgccacgatgaaccattaaatcctataaaactatgcttcggacgctattcatctcgctcttatgcctgctgggaacgaccagggcacaggcttggggaccaaaagggcacgacgtggtcgcctacatcgccgaatgcaaccttacgcccgaggccgcagagaaaatcgacaagatcctcggcggagcctcgatggtatattgggccaactggctcgactcggcaagccacacgccggagtatgcctacaccgcgacctggcattatgccaatgtcgatgaaggtttcacttacgagaccatgacgaagaatccggacggggacatcgtcgaggccatcgaccggatcgtggcggaactcaagggcggtcagctcgacccggcccaggagcaactctacctgaaaatgctggtacatctggtcggcgacctgcaccagccgatgcacacgggacatttgagcgatcggggcggcaactccgttcccgtacggttcttcggccgggagagcaatctccatgcagtttgggacagctccctgcccgaagcggcccacaagtggagctatacggagtggcagaaccaactcgaccgcctgacagaagaagaggttgcccggattcaatccggcacaccgctcgactggttcgaggagagcaatgcgatctgtcgggagatatacgttgcaacacccgaaggcagcgatctttcctacgactacatcgctaagtatgccccggtaatcgagcggcagttgctgcgtggaggacaccgcctggcaggtctgctgaacgagatatacggatagcgctcttttccgtaaaaggaaatcgcaaaaaagccgtcgctattcgagcgacggctttttggttgagcgaaatttactcttcataaaaaatttccaatatacttgttaattcattttcttgaaatttatcgatccgggaaatatactcgccatccatttcgtaacggtaagtcgtaaccccgtcttctccatagtctatcttgaccggcagggttttgaatcggtttccacctgcgccgaacagataaatccgatcgagatcagtctcgtctatgaaatcgctcataccgaacaggtctatattcagattgttgagctgtaccgggtcattttcgtagatggcattcccaccataccactcttgagagctttctttttcttgcactcgaacaagactgccgtcgataacggtatagaccgactcggcactatattcgccaccgggattttcaacccatgtactttcagcgatatatccattttcatcgtaagagaatgtgtagtcggaaagatagacgcctccgccgggtatgctggtaatggcggtagttcgcccgtctgctaatgcatatattgactgcgctccttccggttctgttacgacgatccgatccggcgcatattctatggtcgttacttcatcctcgaaagattcgtcaggagctccttcgaaattatattgctggtccgtttccgtaatggttacgatacgtccttcagcatcgtaagtatagcgtaatacaaaggtcatatcctcctcccacgtaacgcgaacatgcgaaattcgggtcggcagaatcgccggttcctcttcgtccccgccgggagtattcggcacttcgggaaagtgaagaacacccagtatccattcgccgccgtcttgcttcaacaagatgttctgctcgcccgacacatcaggggccgtgaaggtcacggtcgtagccgttacgtcggttacttccgcctgtacatcggcggcacgggttatggcccgtagccagatttcactgtttgcggtaaatccctgtccctgaatcgttacagacgagccgggtgatacaggattttcctcgctcgatgcgggtacgctcacttcagttacggggcacgggagattatcaccgccctcttccttgtcacaaccgcagaacaacaccgcagccatgacgaaaaacaaaaactttctcataatacaatattgattcttcccgataccccgaagaagacaaacactaaagaagtgtgggtatcgtgactttgtttttagttgataggttctggtaaaccgtgagcataaaaacaagcaacaatcccacactgtacacgaatgcacagagcaagggcttcggcttgttctctgctcgaaaaatttaccagattcatcaacgagaacaaactcaaacacttctcatgttcaagcaaatatatgtctgtccgccgaaacggacgggacaaagataccgatttttcctgaaaaagaagtgttcaccgcctgaatttagggattgttgccgcagacaaatttacagattatttgtgtcttaaaaatacagacaactacttcgtcagttcctcggcaaatgaatgatacgaaaaaaccgtacctgcggcaactcggtacgcaagatgtttttatcttttaatcggttccgcaaaaaccgcactttctgaaaaaagggaaacgctccccgtcacggcaggtcacaggtcgtacagaaactccatcacatcgaccgcatccggatagtccgaaagtgtaggctgctgtgatcggccgaaaggaacccgacggctgtggtcgatacagtcggaaaccacgcactgcaactccgcatcgtgttcccgaagccaagctgcgacctgggagagatcgtcgtattcgaccacggacacctcactcaaagcctgcgaaaattccgactggcggatcaacagcgcgaatcccaaatcagaaaacggatcgccgcacatttcacgcagggccttgcgctgacgataattattcaggtatttggggttcattcgtcgagaagcaaaacgaagggaaatacctcgggatacgaaaatcagagaaacgttccgacaccccaggcccgaataggagaagatatcgtcggacagagcctccagttgcccggacgtttcccgcccgttcaagaccgcgaccgaatggcgattaccgcgcaaaagagttttgaccccggcatacaggctgcgaaaataccggttggcattatcgctgccggtggcgatcgcagcatcgaaaggtgtggccccgttataaactgccaccgggatatccggctcgatctttttcagttggtcaatgacgaaactcatcagcatcgcatctttgctcgacattttcaccagacagcgatgtccggccgtaacgacacacaacaaatcgaaaaaaccgaccagcggaatattgccggccatgacgaccagaacggtacgggacagcagggtagcggggcgctcgtagcacgccagccaacgctcgatcttatcacgcgataggaactcctcgcggatcgaccgcacggcatcgacaatctcttccggctcgaaccaatcgttcttctggcaggcccgcgcgataacctcacggctcgcagcatcctgtccgaacgaagagaggcgtgcacccaattccgcccatatatctacgggagtcttcatcggcacaaagatagtataagccgcgtgcaaaaacaagtctgcctgaatcatactgcagccttgacaaagagaggcagaaatttggtttatcgaattttttcgttacctttgctcccgcatttgcggaaatagctcagttggtagagcacaaccttgccaaggttggggtcgcgagttcgagtctcgttttccgctccgaaaacggacgactaaatccttacagcaagctaatcagcgagttgtaaggatttttcgtttgtagcggttaacgagttgctaactgatcttttgcgccgtattgcacggtatctcactttgaaaaagaacttatgtcacaaatatagtgattttttctgtaaatatttcatcacgacacattttgtcgtgtaactcatatatctttgccaaaaagaccaatacgtatggcaaagatcaatcaaatacgtcgtttggcaatcatcgtttcaaaacttaacagcaaacattacgttccggctgaagagttagttgattatgtctcctatacaatcagggcacgttattcggatacggctggctgtacactgcggaccttacaacgtgatttcagaacgattgaagagttattcggggttactatccgtcatgacaagctctgtggatactatattgacgagaggtatggaagcgcagaagattacgaagcattgctgctgaattttgaactgctcaatgcaatcgattcagacagcactattcaaaaatatctactcccggaacatcatcgggcgattattctgccgaatatcgctgaattactcgatgccatcagaaaccggcatccggtagaattcgattatatattagtccgccatggcggtaaggtggttcgcaaatgtttacatccctattttctgaaagaatcccaacaacgctggtatctgatcggatatgataccgatgataaactcaaagcgttcggactcgaccggctttccagtttgcgaattttgtcccgggagcgatttatgcgtaacgatacgattgatattccggcattgttccgtgagagctacggcatttggaataacccagaagatcctgttgaagagattgtacttaaatatgatgttttggacggagcttttgttaagactatgccaatacatccgacgcaggagttgctcgacgattcatccgacgggattaccatacgtttacaactgcgtattaccaacgatttcgtcatggctttgttagctcgcagccgttctgtcgaagtcataagaccggtttcacttcggcagcgaatttacgaaatttattgccaggcgcttgaacgcaataaacctacatgcaatgaatgacaggaacagcttttggaacgaatcgacaggagaacggctgatcggatgcttagggggctcaataggtatactatcgctgctatgtgtagtaagtgtgatcgtgcatcattgcaatcgtcctgtccccacaacaaccgccgccccctggctcaacgacgatctatcacgtcctgtaaccgacataaaggaactcgactataaccgtcgcctgattatttatcgagatgaggaaccccgacggcaattacagaaattcgaataccctaaggacgagcgaatatatggtgagtctcaaaacctatacgaagactactacgaagagatatatgaatattttcacgattaaaaacagttgatctatgaaaccttatgaatttgaacaattggtctgcgatcattataggcaaaaaggctatcgcgtacagacaacttctgcttcgaatgattatggcatcgatgtatttgcagagaaaaaaggagagaagattgccgtacaagtcaagatgtacggcggatcaacgcgcaaggtcaaccggcaaacaatgatggaactttatggtgcagcggcttatttcgattgcacgaaagccgtactggcaacagacggagaagtgcttaccgatgctaaagaagtagcgcataaactcggaatcgatattctatttatccagccagaccggaaaatctccatgccgagcgcatcgtcggctgagtggagtttagccgacatcatatgggagaaatacatcatgcctcttgccggaaaaacattgacgcgcgataacggtaaaacaaatcgcattgtaaatgtagattggagcggtatagaacgtatcacatccaacggaaagcaccaaaagatcggaattgagatttttcgtttcacaatggacaggctctttacgacaggacggattacgcgcgatgagattaatcagaattatgcaaaacgcgcgtcatcgggtattgtattgattctttcacaggccccttgtttccggctcgtaaaacagcctgcggcattggaattagcagaagaatatccgctttacagcatggtgttgaaccacctgtcgcaagttaagtaaatataaccgttcaattcagcacgaatcattgatatacaatacccctttgtgagttttgctattgtcgaaaacattttctaattttgtggaactgtcccgaatgggtggcaatatattagtttagtgaaagtgtttcgctgaatcctcgataggaaatctggtaaatgttattctacaaatgattaatcgtttgtatatcatcataatagcattttgttcaacttgtaagggaaacaaaacaggaacaaaatcaaggatttaagcgattctccgtttttcgcatttcacttagtttcatcctttacacttggtcgtactaaaagtgtttttcaagccattttttcctgacaactaatcgctcttctgagaatatattgttgaagcgcattgatgaattgttgcagccaaaagagaaaatgacaaacgtcagtcttatgggtatatccttattagattttgttcttcgcaaaggtaactatttctatcaagtcataggcatatggaaaggcaaatatgcctacctaaatttagtttactttgatttagcatatatataggctaatagactaaactaaactggtttttcaatggatttccacattcaaccctgcataaatgcacagccaaaagagaagataactttactacatatttctcttttcgctgcaaatttataggacgaataaagaagtttaaacacccaacaattttagagggttaactaagtctatcactctgaaagtagataatcagcttatatatataacttgcagaataaagtgttatttgcgattttgagtaattttattgtgactctgacgtttatattatttatccttatagttcatttactttaatctagccaattgtccttaataaatgcaacaattctatctcggcgttctgatatttgtatttcattccatttcttttcgctctttaatgtctcatatatctctttgtgagaataaaaaatactattatacatctccactacaccatcatttgccggattgtgatttttcttggcagagttattcccccatgtaagaagcgatagattacctatattattgagatattcattacaaaattcttcggaatattctacaaaatcaggtgtttgaggggtaatatggtctaatgtattcgatacagacacatcacggaatacattagtacattcatctggagacagtaaaggctggcgtgccttagcacgtaagtagttttcatatttatagagtacatatctcagttctctacgataatgatacttatttgcagtgaagtagcgcagacaatctccattaaaattccaatactccttaaacccatggcagcacttgtatgtaaggtctgctataagattgtcatattcatcaggtttatattttttcgctatggatattaaattgttggtacgatagccacctagtgtataagtcattttgaataatattttctccactaatttcagtgcgttatcaatagctggaatatttcttacatctattccgttgctattataatggcaaagtttgagtaccaatggcattgaattagccttatcaagaatacatacatcagctatggggctattgaatagatgccaagtattctctatttcacacattaaagaataagaacagcatagttcacttacaaaagaattaatccactgcgttttatcatcagcacgaagcaaactttcttttattgcatctaatggagaatcataacttgaaagaaatgccgaacaatggtatcctaagactgaatcttctttggtttcaagtctttcaatatagttgtaaattgaagcaaacttagcttctacagagtggatgttactaattgcattagtggtattattcctgtatatttgatgcattagaaaagctttcaacttctctaatgtagtcaatcccaagcctcggtcattttggaaggcaaagatttgagttgccgtaagttttgcagactcaccactcaataaaaatgttgttatgatggcattgtcgattacatgaaaccacttaaaaagagttccctcctcagtttgtgtagccattttttcttcaaagaaacttgaggcttcacgaatacgtcgttctgatcttcttccagtttctatcctataatcgctatcacattcaataattaatcggttaaaaaaagaggaatcttcagggacagtctcaaacttttggcttccataacgcggttgaaggtatcgctcgtatatttgttcagtagcatattgcatattattataatcgaatcttacaatcttacgtttacgcaattctttcactaaacaactcataaagatgaccgttgtagtcaacctttgctgtccatcaattagctcatatctatttccttgagttttttcaaaaagataatgaccaagaaaatagctcgaattatcaggttggtcgataatatcattcagaaacatatcaacctgaccaacacgtccatctttgcccactctccaagaataagctctttgataacttggtataacgaaagttatcatatcttctccaaacaagcgtccgatagttgtttgattgtccattttgtatttaaaattccaataacaattttataagtgtatgtgaatagggtgtacatgtttggtacaccctattttacatttaatatgcagagcgggtatttatctttttaccagttctatcataggtgtccagccaagcacttcttctcacaatgaaagtgtcacctgaaatactcacaaatgaaccgatggattcactaagcgttttgtactttttacctgattcatcatataaatcgtaccatgcgcttcgccttacaacgaaaaaattagcagcccaaccaagtacctcaccgatactttcgctgagtgtcttttgtttttttccacgttcgtcatagatgtcataccatgcactacgacgttcaatcattgaaatagccataattaaattaagtggtcttacagctcctttgggaccttttaaagttaaaaatgggaagcgtggaactgtatgccacactcttacttgaaggtcgtaggaaaccttggatacagatgtaacaatagcagcccacgctatagcgtgagaaccactatgctatctttgtatccaatttgaaaatttcctacgttttcaagtacaggataagcataacgcttctttcttttctaatatgtcttggaaaggagttacctcaaatccaacgcaaaaataatcaaaagtttcggcaataccttgctaccgagtgattttttatgcgtgagagtgccaactgcgcaagatttataatttcttgtccttatctgtcgcttttgtcggcataaccatagttttgggaccgcccgatgtggtcggtttcttctaaaatattatttctttttgcttgggcatattgtggagcaacagttttcaacgagaaaaagaatcccgttctatttaactgatacctacataaaaatattgaataataaatttgtcaaaaggcattatatctttaagatttgaaatgaggttctttggacttattgttttaaattgtatgataatttcagaaatttccttagtatcatcctccaaattaattaaaccagaatcttgaatcttgcgactgatcattcttggcaacccatactcttctagttgatatacgagttttggaaggaatgcgttagatgcccgtcctataaagagagatatgtcgggagctgccggatcgaaagattttttcaaaatattaatgacagataaagttgtgcataagttgtatgaaaggtaacgttcagctgcgaataagtcttcgtaactaattttatatccgtccttttctaattcatcatagatgaatgccacagaatgagaccaattctttggcattttccatatagcaagttttatcaatcctcccattttatcaccaaggagattaatgacatctttaataggttcacgccaattatatgtattagttgctgcaagggcagcataattttggggccaggcagggtctgcctttaactttcttaccaaagtttttatgagtttggaatcacaagatttgaaagcagggagcctacggatgttgttgaagttttctcgtcctaaagcttttatcataaaagactcatactctttaatacggtcattctgctcttcgttgatttctacgcccggatttgctgaatccagagattcaacaacctcttccggaaaatcgatctcgagggttgtattttcttgtacaggaggttcttccaacaaatacacctttcccacaaaatacttgaacatacgacctgcacggccaatgatgttcctataagtaaaatagtcaaacttgcacgagccattcttgttagaccaaacaactacttgttcggcttgagtatttacaccttcaataatcgaagatgtggaaaccattgtgtcaataccttcttcttgctcaaaaagtttgacctgtatttgactcaatgatctgtgcatcttgccattatgtaccccaattcctctttcacttaacttgcatagcgaaaatttacgtccataattaactctaagccaatcgttgaaatcctgaagaagtgaggtcttttttaccgctaaatcattggcaaggatattcgagattgtatcgatattcttataactgccggcatagatcagcgtttttgctctctttttttgtaaaattttcagaagatgtccttttttaaattgctccttgtctgcgcttttgggcaaattcttataaagatgggccgcctttgtaatgactgttttaaagtccgttaaacgcataaactgcattccttcggtaaagacgttgtcagaaattttatgaatgttgggagcaaggtaataccgttgtcgagaaattttccccaattctatcatcgcacttagcagagaggaacttctggagtcatcgaacatggaacttgccttgtagaactcatccacgatgagcatgtcaatcttttcaagcttatcgaaataagcaaagctgcgttcttgcggaaagataaaaatgtttctttctgtaatggtggcatccgtggtagtaattatcttatagaaacgagaaaacttatgttcaatcctgcggcgtgtttcatccgctaaggctatcgttggaacgattataaccacattgtccggttttctgattgaaatgaaagcgtcgatgataaaacttttgccaaaactcgtaggggcactcacagcgatattctcgccaagcaataggcgcttcaaaacacgagactgggcactatgcagtgttacgggtgttttatcgccaacatctgctttgaatgcctcgaccacgacttgatcgtcccatgatgctgtctttttatcgatatatgggaatagaccgacaacccggatgaaatgattaaccataggattatactggttcccgtcttgttgcattctatccaataaattgatcactttacagcgagccgtcgccaagtctcgcttctcaatcaaatcattaatctgatcgcactcggagtatatctcgtaatcaagcatcttccttaatttgtttagctcgttctacaaaccaattgacaatctcatttttattagggacagggaaaagaatcaaatggaattgaatattatcgtagccatggacattctgtttcttttgcttaccgttctgaatattgaaatagttgacagctcggtccaaatggtatcgcttaatctcttccaaataagtctctgacaactcagttgctttctgtgtcttatcgcattcatgaagcaatagtatgggaacatgtagtcttttccttatttcgtcaacagaagtttcacgtctgagaatagtttgaacaaactttctcgtatcaggatcgggaatgacatattgcaaatccgaaatacttgtaataatggaattttctttctttatcttatcagtactgatagtatcgaatacggacttgacaggctcgtacattcgctcattggcgatgttactataaatctctggaaaagacgaataaaaagggacaaatgtcttcgtaatgcctgtcaataaggcgtttgcgaagacaaatgaggacaggcgaaaaatcgaggtaacgtaaaggaaagcggatttatgaagaagaacggtctccaaatcattacccgccgaatggtgatttttaacacaccgtgttgtatttggcagcttgtggcacaggttggcatatcaaggtctaactcgttgagtaataactttgcaaacaaaaaacgagtatggcaagaagcacattcaaggttctgttctacgtgaacggcagcaaggagaaaaacggtattgtccccatcatgggacgagtgacaatcaacgggactgtggcgcagttcagttgtaagcagaacatcccgaaaacgctttgggacgtgaaaggaaacaaggcgaaaggcaagagccgcgaggcacgagacatcaaccttgcccttgacaacatcaaggcgcaaatcatcaaacattaccagcgcatttcagaccgcgaggcatttgttacggctgagatggtgcgcaacgcctatcagggaatcggcagcgagtatgagacgctgctaaaagcattcgaccgtgagaacgaagtgttcaagaaacgggtaggcaaagacagggtaatggctacctatcgggcacgtgtacgggcaagaaaccatgtagccgcctttatcaagtcgttttacagacgcagcgatatgtccatgttggaacttactcccgatttcatcaaggagttcgccgcatacctctcgactgaagccggattgcggaacggttcgatatgggcaaactgtatgtggctgaaaggcgtggtcatgaaagcgcattataacgggttgataccgcgcaatcctttcatccagtttcatatcagccccaatgtgaaagaacgggaatatctgacggaggatgaactgaaagcggtcatgacacatgagtttgcagacagcaagctcgcatacatccgtgacattttcatctttgccagtttcaccgtcttgtcattcgtggacattcaggaactgacgaatgacaacatcgtggaggtgaacggcgagaagtggatattgtccaaacgccacaagacaaaagtcgccttccaagtgaagctgctggatatacccttgcagatagtcgaacgctaccgaccgatgcagaaagacaatcgtatattccccgacttgaactattggtctatctgcaaaccgttgaaacggatgataagggaatgtggcataaccaagtcaatatcatttcattgcagtcgtcatggcttcgcaacattagctttgagcaaggggatgcccattgaaagcgtaagccgtgtgttgggacatacgaatatagtcacgacccaactctacgcaaagataaccacgcagaagctcgacaacgacctgaccatgttcggcgacaaactgagtaagacgtttaacggaataacgatgtcatgagtatgagaagaaacagcataacagtgaatgaatccggcaatatcatcatgccggagaatgtctcaaacatttggatgagcgagccggaattggtggaactgttcggagtaattgctccgacacttcgttctgccatcagaaacatctataacagtggagcattaaaagaatacgaggtacagaagtatgttcggcaggagaacgggtatcatgccgatgtgttcagctttccgatgatagtcgcacttgctttccgcattgacagcttcggtgcggaacaggtgcgcaatgccatatttaaaaggctgtacttgcgaaaagagaaaacaaatatcttcttttcgctgggtataaatggttgggatatgtctaattatcaggcataagttctaatgatatgacgacatgaagtagtgagacctatgcgtattcccattgccaacaatgtatttatacgagtatgtgaataggtgtattgccattcatacgtacgattacgacaaacccgaagaaaaatccattagaatggcatttcttcgggcttttgttgtatgtcataaagccaaatccaagaaaatcttacgtgaggtatgcgtgagttgttaatccgttctgcgctaattgccgagttttgcactgattaaacaaaaaaatgaagtgctaatgaaacaaggcaactttgaaaatgaggagtttatccgtgtgggtactaccctctacaagttagtgaaccagccccgtctgaacggaggctatgtgaagaagcgcatcgtgtggaacaacgaaacactgcggcaggactacggcaaggactatctcgccaccgtgccgaagtacgacggcttctgcaccgtccccgaccatgtggactaccgtcccgtggtggacaagttcctgaacctctacgagccgataggacaccgtccgcaacaaggcgagtttccctgtatccggtcattggtgcgccatatcttcggtgaacagtatgaattgggcatggactatcttcaattgctctacctgcaacccgtgcagaaactgcctatcctgctgttggtatcagaagaacgcaacacgggcaagagtacattcctgaacttcctgaaagctgtgtttcaaaacaatgtcactttcaataccaacgaggacttccgcagccagttcaattccgactgggcaggaaaactgctcatcgtggtggacgaggtattgctcaaccgcagggaggacagcgagcggttgaagaacctcagcaccacactttcctacaaggtggaagccaaaggcaaagaccgtgacgagatagcgttctttgccaagttcgtgctatgctccaacaacgagtatctgcctgttatcattgatgcaggtgaaacacgctattgggtgcgcaagatagaccgtctgcaatccgatgacacagacttcctgcaaaagctgaaagctgagatacctgcctttctgtattacctgcaatacagacaactttccaccgaaaaggaaagccgtatgtggtttgcgccctctttgctgcataccgaagccttgcagaagattatccgcagcaaccgcaaccgattggagatagagatgtgcgaacttatccttgacattatggaaagtgtcggcacggacacattctcgttctgccacaacgacattcttcttttgctggtacattcgcaggtaaaggtggagaagcaccaagtcagaaaggtattgcaggaatgttggaaacttactcctgcctctaacgggcttacatataccacttaccaattcaattacaatcgggagtgccgatatgagccgataaaaagagtcggtcgtttctacaccgtcacaagggaacaacttgaatccctgtaatactattctttttttgttgaattgatgaataatgatataaccatactgataataaacagcatacactctcaacaaattctcaacaatcgaaaagaaaagttgagagggaaacagcatcagtttgttggattctctatttgtgagtggtttgttgagaagatgttgagaatataaagcattaacgtataggacaatacatatctcattcatcaaatcaacgtttttacagtcatcatcaaatccatagaaattatatcatgaacatccaagaagcaaaacaaatcaaaattgcggactatctgcaaagtttgggttattcgcccgtaaagcaacagggaaactgcctgtggtataaatccccgttccgtcaggaaacggaagcctcgttcaaggtgaacaccgaccgcaacctgtggttcgattatgatgcgcccatataggctacacaataaatatctctatggcaagagattaggttagagttcaacagacctatcctcaacgagacatgcaagtacggtttgggggcaggtacgggaaaacctactgccgaaaggcagtaaggcgttctgtaccgagcctaccactcggcaaaggcggcggcaccatcgaactggcgtcacacttatatgctaccgaccatataccttatatattggaacgcatagcggaacagacaccacatatccgtcctgattctttctcttttggcaagcagtcatcttccgagccacgttttcaacaactggagattgtaccgctttcttcgcctgccctactctcatatttgcaggaaaggggaataaacacggaactggcgaaaagagaatgccgcgaagctcatttcaccaacaacggcaaacggtatttcgccattgcctttccaaacatatcgggcggctatgagattcgcaaccgttatttcaagggctgtattgcccctaaggaaatctcccacatcagacaggcgggaaaagcgagggaaacgtgttatgtgttcgagggatttatggactatctttcatttcttactttgagattggaaaattgcccgaaatttcccgaactggacagacaagattatatggtattgaactctgtatcgaatgtgagcaaggctctctatccgttgggtagctacgagcgcatacattgtttctttgacaatgaccgtgcagggatggaagcactccggcaaattcgtatggaatacggcagggatttatacatccgtgacgcttcgcaaacctacagcggatgcaaggacttgaacgaatacttacagaaacaggctgaaagaaacaggcaagtccagtccgtaagagagacgcacacccagccaccgaaaaagaagaacggttttcggttatagcccactataactacacgctccgctttcgtagttgtgggctctcccgaggggattagggctttgccctaataacccactcagggcgttcacccctgagaaccccgagcaaagagtgaccctctctttgcaatcaccgcttatgggttgcacccctaagaaccccactgcggaagcgaacaaagtaatctaatgtaaacaaaaaaactatggcaacaaaatcaagcatacatatcaagccttgcaacatcgcatcgagcgaggcacacaaccgaaggactgccgagtacatacgcaacatcggagagtccagaatctatgtcgtttccaaactttccaccaataacgagcagtgggtaaatcctgacttcggcactaccgaattgcggacacattacgacaacatcaaacggatggtcaaggaaaagaccggacgtgccatgcaggagaaagaacgtgaacgcaaaggcaagaacggaaaaatcatcaaggtggcagggtgttcacctatccgtgagggggtgttgctcatcagagcggacaccacattggcagatgtgcataaatttggcgaggagtgcaaacaacgctggggtattactccgctgcaaatcttcctgcacaaagatgaaggacattggctgagcggacaacccgaagctgaagacagagagagtttccaaattgatggaaagtggttcaagccgaattatcacgctcatatcgttttcgattggatgaaccacgatacaggaaaaagctgtaaactcaatgacgaggatatgaccgaaatgcaaagtttggcttctgacattctcctgatggaacgaggacaatctaaaaccgaaacaggcaaggaacatctggaacgtaacgatttcatcataaagaaacagaaagccgaactgcaacgtatagaggaaacccaaaggcacaagaagcagcaggtaactcttgctgagcaagaactcaaacaggtaaaatcggaaatacgcaccgacaaactcaaaagcgcagctaccgatgcagccacagccatagcaagcggtgtcggttctcttttcggaagcggaaaattgaaagatttggaacaaactaatgagaatttacgtcatgaaattgccaagcgtgacaagggtattgatgaattaaaagccaagatgcaacaaatgcaggaacagcacggcaagcagattcgtaacctacaaggaatacataatcaagagcttgaaatcaaagacaaggaaatatcacgattgaacaccattcttgaaaaagcgttcaactggttccctttactcaaagagatgttgagaatggaaaaattctgctatgccatcggatttaccaaagatatggtaaacaatcttttgacaaaaaaagaagcaatcagatgcaatgggaaaatctattccgaagagcatagacgaaagtttgacataaagaacgatattttcaagattgagaaaagttcggttgataataataaattggtgcttacaataaacaggcaaccgataggcgaatggttcaaagagcaatgggagaaactccggcaaggtttacgacaatcagcggaagagccaagaaaaagtagaggattcaagctataattccactctatataatgcaaaacatcaataaaataactaattttgcattcggataggggcaactctttccaagacataagaaaaagaagcgttatgctcatcttgtaacttgaaaacctgagagcctttcaaatttgatgcaagagatagcatagtggttctcacgcatatagcgtgggctgctatcgttgtatctgcatcataggctttctcagggccgtcaagttagattgacataggtagtccacgcttttgtatttaataacctaccctgttggactgatgggcgaaaaggaaaacgatatggaacaaaaattctgtcaaagctgcggaatgccgctaacaaacgaaatcctcggtacgaataccgatggcacactcaatgaagattattgcatctactgctacaaagatggcaagtttgcgcaggatatgactatggagcagatgattgaccactgcgcccaattcactgatgagataaacaaacagtcaggacagaacttgacacaggaacaggctaaagacatgatgcgtcaattcttccctcaccttaaacgctggaaaaatagactcgttatgtttattgcaattctcacatacaaaaagccgttgagcgaggttgataactatctgagtgcgcaccgtgaatatctcgccaaacattatgccatcggagatttcataacatctgggccacagatccctcgcattggtggcgtgataatgataaaagccaacaaccgtgaagcggttgatgctattatttccgaagatccgttccacatcaacgacattgccaactatcagattgtggaatttaccccgacaatgttttgcaatgaagagttgaaaacaattctataatgatgcgccttagtcttagaccatatcagcccacagatgccaatgtaattactacttggctaaaaaacgaatatcttatgcgccaatggtgcgctgacagatatgagtgttacccggtcacaccagaagatatgaatatctatcacgagcggtatattgacggacaaagtcaacgcgccctgacaatgttgaatggcaataacattgtgggatatatcaccctgcgcactccggcagatgattcatcggaacaacgcttgggattcgtcattgtcgatgattcaaaacgtggtcaaggttttggtaaaactcttgtttcaatggcagtcaaatatgcttttgagacgcttggtgctacgaaagtatcactcggtgtctttgaaaataatccgtcagccatccattgctataagtctgccggattcaggcgcgtgattgttccaacaacagaaagctattcttgcttgggcgaaacttggaattgcattgaaatggaacaatacaaaggactatgaaagtaattggaattaacggcagctcacggaaagatggtaatacagctatcataatccgcacgatatttgaggaactgaataagagaggtattgaaaccgagtttatccaattggccgatgtcgatatagagccatgccgtgcttgttttgcctgtaaaggtaaaggtaattgtgtattccgcaaagacggttttgccgaggtatttagcaaaatagttggagctgacgggataattctcggttcgccggtttattcagcagatgtttcctctcgaatgaaagcattgttggacagaggtggcgttgtcgctgctgtcaatccgggaatattgaaacacaaactgggcgtggcagttgccgccgttcgtcgtgccggaggtatgacggcggtcgatacaatgaatcattttttcttaaacaaggagatgatagttgctggttccacatactggaacatggtttatgggcgagaaattggcgatgttcttaaagataatgaaggaattgccaatatgcgcaatctcggtcagaacatggcttcaatcctgttcaaattaaattaatggtaacgaatccgatagcaagtaacccatgattgaaataaaaaacctcgaaggcatttcattcgagcaaatatatacggctttcaagtcagctttctcggattacgaaatcagcgtggataagacagaattgaagtcaatgctgaaacggcgaggcttcaatccggctttatcattcggtgcattctatgatgacaatatcgtggcgttcacgtttaatggtattggtaaatactataatggcaaacttactgcatacgatacgggaacaggtacaagaaaagagttcagagggcaaggacttgccaaaagaatatttacgcactctatgccattcctgaaaaatgccggtatagagaattatttgcttgaggtgcttcaacataataaaagagcgttaaaaatatatgaaagtctcggtttcgagattttacgagaatttaatttcttcactcaaaagaagcaactggttgttaaccatctatctgacaaacctgccaaatgctccatcgtcgcgctgaagtctgaagatattttgtcagcccaatcattccatgattttaccccatcctggcagaatgacattgaatctattaagagagcaggtgatgatttggtgacgttgggagctatggttgattctgttttgtcaggatactgtgttttctctccaaagtccggtgacattacccagatagctgttgatccgactttccgcagaaaaggcgtcgcatcttccttgctaaaacaaatgattgagatgactgaatctgaaatagtaaaagtaatcaatgtcgaatctccaactccttctttggacgcatttctcgcgtccaaaggtgtttgcctcgccggtaaacaatttgagatggttttgacattataaaaatgtaacatcaaatgacaccgaaagaagtactggagaaatggattgattgtttcaacgcgtccgacgtggagggaatcgccgcgctatatgcggacgatgccgtaaaccatcaggtggcgaacgctcccgtggctggaaaagaagccatacgccggatgtttgccggggagttcgcaacggctaaaatggtttgtattgttgaaaatatttttgaagatggagaatgggctatattggaatggaaagacccattggggttgcgtggttgcggcttcttccatatcaaaaacaatcttattgtatatcagaggggctactgggacaaacttagtttcttgaagcaacacaatcttccaatcgaatagacgttttgtaatgccaaaacacttttacaatgccatacatatcagttgaaagcggagcattgaccgccgaacaaaagaaagaacttattgagcggctgacagcgacagccgccgaaataatccatattccggcgcagttcttcaccgtaaccattaaggaattgccggatgagaactttggtatcggcggcaagtcgattgacgaaatcaagcgaaattataaatcttgatttgcaaatagatggataatgaaattcgaaaataagaactatatctattggctatgcgccacaattatcgtcatgttcatgctacctttcgttgaggctcagctcgcatcggagtgtagcggcatggtgttgtgtatgattttgtttcatgacttcataaggtaattgtaaatggaaagaatcactgatcaatgcatagtcgctcggcagttttcttaaataatacaaaaacacccaattttacattattgggtgtaaaattgggtgtttgttttgtaatttgctgatttccaacatttattgcggagagagagggattcgaacccctgatacgctttagacgtatacgagctttccaggcgcgcctcttcaaccactcgagcacctctcctcggatgggcaaagataatgatttttccggcaatcgaccaaatttcgctcctactaattcaccgtccggcacgatattttccggccactgtcggcaaaagacgctcccgcatgcttcagaacccgggcaaacggcattcattccccctggctcccgcccattcgccgtcaggcaaaaggccgcgtgccttatagccgaagaacggccggcacggaaccgaccctacccaaaaacgaatctccaggcgcaaacggtataacgccgtcccacccgctacttgtccgcaaccatctgcttccactccggatgccgcagaatataacgggccatgaatcgacacagcggaaccactttcagcccctgccgtttcagatcttccagcaccgccaccgtcagctgcgaggcgataccctgtccgcaaaaccgatcgggaacgcccgtatgggtaacggcgatacacccgggaccgcactcctcgtaatccaccgctgccgtagcaccgcccaaatcgaattcataacgtccgagcgccttattattcttcaattcatactttttcataaccatcgaatattgattgtatgcaaagaagaacaaaatccgcaccgcaacccacatttcgggaaagaaaaaaccggaccggacaaattgcccggtccggtatcgcaatccgcacgaatcggctacgccttgccggccgatccgagaactttctcgcatttgtgcatgtagagcttcttcatctcctcgcgggccggccccaggtatttgcggggatcgaactctgcgggtttgtcggtcagcaccagacgcacggcggccgtcatggccagacggctgtccgagtcgatgttgatcttgcaaacggcgctcttggcggcacggcgcaactgctcctccggaatgccgatggcatccttcagcgcaccgccgtgcgtattgatgatatgcacgtactcctgcggcacggaagaggaaccgtgcagcacgatcgggaacccggggatgcgtttctcgatctcctccaggatgtcgaaacggagttcgggcggcacgagcacgccgtccgcattgcgcgtgcactgctcgggcttgaacttattggctccgtgcgacgtgccgatcgagatggccagcgaatccacgccggtcttcttcacgaaatcctccacgtcttcgggacgggtgtaggtatggtgttcggccgaaacctcgtcctcgacaccggccagcacacccagctcgccctccaccgtcacatcgtgcttgtgagcatactccacgaccttcttcgtcagcgccacgttctcatcgtaaggcaggtgcgaaccgtcgatcatcaccgacgagaaacccatatcgacgcaatccttgcaaagctcgaaagtatcgccgtgatccagatgcagcacgatcggaatgttcttacccaactccttggcatactccacggcaccctgggccatgtagcgcagaatggtcggattggcatacttgcgggcacccgacgacacctgcataatcacgggcgacgaagtttcgacgcacgcctgcacgatggcctgcatctgctccatgttattgaaattgaaagcgggaatggcatacccacccttgatcgccttggcaaacatctcgcgggtattcaccaggcccagttctttataagataccataattatataataatttaagaatttatgcgttcctatctttacaaaattaagcattatttccttaataacaggctctttcccgaataaaaatcaggcgggagaaaaaatagcgctcaaacggaatattctgattttattttagtaaatttgcgaataattggcaatttttctaacgctacaataaagacctcaacaccatgtcggaattcatctatcaagaaccattcccgatcgaatgtgacaagacgcaatatcgtctgctgaccaaagagtatgtcaagatcgtcgaatgcgacggacgccgcattctcaaggtcgatcccaaaggtatcgaactgctggcccgcgaagcctataccgacgtatcgttctacctgcgcccggcccatctggagcaactccgccacattctggaggatccggaagcttccgacaacgataaattcgtggcctacaccatgctgctcaaccagacggtcgccgccgaaggcgaactgccgacctgccaggacaccggcacggccatctgcatcggcaagaagggcgagaatgtctttacgggagcggacgacgccgaatgtatcgcccggggcgcctacgaagcctacaaggagcgcaacctgcgctattcgcaggtggtgcccttcacgatgaccgaggagaagaactcgggcacgaacctgcccgcacagatcgatctctacgccgacaaaggcaacgaatacaaattcctgttcatcaccaaaggcggcggctccgccaacaaaaccttcctctaccagcagaccaaagcgctgctgaacgagaaatcgcttctggaatttttccgctcgaaactcatggatctcggcacctcagcctgcccgccctaccacctggccgtctgcatcggcggcacgtcggccgaaatgtgtctggcgaccgtcaagaaggcttcggcaggttacctcgaccagctgcccacctcgggtaacgaaggaggacgctgcttccgcgacctggagtgggaacagaaaatcctccagatctgccgggagagcggtatcggcgcccagttcggcggcaaatacctcgtacacgacgtgcgggtgatccgcgctccgcgccacgcggcgtcgtgccccgtcggcatcggcgtaagctgctcggccgaccgcaacatcaaagccaaaattaccgaagagggcatcttcctcgaacagctcgagaagaacccggcccgcttcctgcccaaagaggcccccgccatgtcgcccgccgtggacatcgacctggatcaaggcatggacaaggtgcgcgaaatcctctccaaatatccgatcaaaacgcgcctgaacctgcgcggcacgctcatcgtggcccgcgacatcgcccacgcccgcatcaaacagatgctcgatgagggcaagccgatgcccgaatatttcaagaaacacccgatctattacgccggtccggccaagacgccgaaaggaatgccttcgggcagcttcggacccacgacggcaggccgtatggatccttacgtggatctgttccaggagcacggcggctcgctgatcatgctggccaagggcaaccgctcgcaacaggtgacggacgcttgccgaaaacacggcggattctacctcggttcgatcggcggtccggcggctgtgctggccaaagattcgatcaaatcggtcgaagtggtcgatttcccggaactgggtatggaagccgtccgcaagatctacgtcgaaaacttcccggccttcatcctcgtggacgacaaaggcaacgattttttcgcgcagctcaaacactaaacgctccgccccggccgttataggggcaaccaaggaaacagacagtcaatgaaaggttttttctgtaaaataaccctcgcattatgtttcgtaatcttcgtcggctccgcagcaagagccgacgaggttactttcagcgccaacgccccgatggtcgtcacggcaggcgaaagtttccgggtggagttctcgctcaacgccacgcccgacgacgattcgttcgaagcgccggatttcggggcgttcgacgtactggccggcccggcgatctcccagggacactcgatccagatcatcaacggcgcgatgaccaaaaacgtcaattatacgatcacctacgtattgctggcccaggacgcgggcaacatcacgatcggtccagcctcgatcaaggtcgataaaaaaagatacaagacccagcctctgccgatcgagatctccgacaaaccgtcggcaggcagcgcccgggctccgcagggaaattcagactcttcggatgaaagtatcgaggaggaagcccagggacagattgccaaagacgatctgttgctgcgcgtccacatatcgaaacagtcggtcttcaaaggcgaacccctgctggcgaccttcaagctctaccgccgggtggcgatcgtgggctacgaagacattaaattcccctccttcaacggcttctggacgcaggacatcgacgtttcgaacgccatgtggcagcgtgaaaccctgaacggcaaggtctatgaatcgacagtcgtaaaagagtgtctgctctacccgcagcaggcgggtacgctcgtgatcgaacccgcaacgatcaccgccattgcacaagttatcgtacagagccgccgcaatatcgatccgttctttggcggcgggcacgaagtctataatttgcggcgcaagttgcagacgccccgcgtgaacatcacggtcaaagagctccctgcgggcgctccggccagctttacgggcgccgtcggcaaattctccatggacgcgtcgctctccgcagaccaactggcggccaactcggccgggaccttcacggtgaaaatcacgggacagggcaacctgcctttcatccaagcaccgaaactgacgctgcccgcctcgttcgagcaatacaacgtcaaaaccaccgaatccatccaaacggcgactgcgggaacctccggctaccggcaattcgaatatccgttcatcgcgcgcgccgaagggacgtaccgtatcgattcgattcttttcacctacttcaatcccgaccgccgggaatatgtgaccctctcctcgcaaagcttcccgctgcaaatcacaccggatgccaacggcggagagagctacatggtcaaaggactctccaaggaggacgttcagatgctgggacaggacatccgtttcatccgcctgggcaaggcacacctccagccgatgcacgagccattcttcctgagcggactctatatcggactgctggctgcgattctcgtccttttcgccggaacttacatcgcgctgcgcaagcagatccgcgacagccagaatgcggctttgatccggggccggcgggccaacaaagtggccattcagcgtttcagaatagccaagaactatatggaagagcacaaccagcacgccttctacgaagagatgctgaaggctttatgggggtatatgagcgataaattcaatatcccggtagccaatctcaccaaggaaaacgtccgcgaagagctccacaagcgcggggctgcgccggaagacacccagctcttctcggaactcatcacccgctgcgacgaagcccaatattcgccggtggcttcggcccgtatgagcgacgtatatcgggacggcctcgaactgatttcccgcatcgaatcgatcatcaaacgccaaaagccatgaaacgatatattctctttctcctcgctacgctgttgagcgcggcagttccggggcagactgccgcccgaaccgattcgctggctcaacacccgcaatcggagcaaaccgcctcggcagcttacgcatccgatcccgacaagttgtgggatcaggccaacacggcttacatcaacaacgactttcctacggcaatttcgctttacgaaacgattctgtcgagcggcaggcaatcgggcaaactctactataacctggcaaatgcctatttcaaggagcaggaaatcggtcgggcgatcctcaactacaaccgggcgctgaggctcaatcccgggaacgaagacatacgctacaacctgcaagtcgccgagaaaatgaccaaagaccacatcgacgccgtccccgaatttttcgtcaagacctggttgtcgaatctgcgcaaccttttgagcagcacgacatgggccgtcctctcgctggtcttcctggcggcaatgctcggctcggcgcttttctatctgctctcccgtcgtctggtacgacgcaagataggattctacggcaccgcgacagcctttctgctgctggtactgaccctctgcttcgcagccatcgaccgccgggaggcgatcgaccgcacatcggccgtcgtactgcgggatgccgtcgccgtcaaaagctctcccgatcagaactcgaccgatctcttcattctgcacgaaggcaccaaagtagaaatttcggaccgtctgaacggctggtgcgaaatcaccatcgccgacggcaaaaagggctggatggagtgctcgacgttcgaaaccatctaaaaaaaccggatccgcccctgcgaatccaaaaatttccaagaacgtgtccagactgcttcaagacgtgaccggagaactgtcgaaactcccaggcatcggacgccgcacggcgttgcgcctggcgatccacctgctgcgcatggaacccgattcggtaagcaacatgacacgcagtatcgaccgattccgccgcgacatcaaatactgcaaattgtgcaacaacctctcggatgaagaaatctgtccgatctgcgccgaccgggagcgcgaccatacgaccgtctgtgtcgtagaacaggtcgccgacgtactctcgatcgaaaatacccgccagtaccgtggactctatcacgtattgggcggtgtaatctctccgatgcagggcatcgccccttcggacctgaagatcgacctgctgatcgagcggatcgcccaggggacaatccgggaagtgatcctcgccatctcgacctcggtcgaaggcgaaacaaccctgttctatctgctcaaccggctgcgccagtacccgcaggtgaaagtcacgtcgatcgcccgggggatcggcttcggcgacgaactggaatacgtggatgaactgacgattactcacgcactgatgaaccggcgggaaatcgaataggaaactcgcacccggaaaatccgaacctccgccaaatacaaagcaaccgcgaatatccgaaacgaatattcgcggttatttttccaccgggccgacatttcaccgctgatcgacgaaatgaagcttatcggtatcgaatccctgtttttcgacctggtccagaatccggaccagcacctgcgtagataatcgaggtcggcgagcgagaatccataaatatttggccgatcggccgcttacgacgacccactgccgctcggcagcggaatcgcatgccgacatcgtatagtcgctataaaaaaaccaacaagacgaaacccgcaggcattcgtaatcggcagacaaccgaccttttgcactcgaaatccggtcccggcccgttctgccgtccttgccccgatagacgattcgcattttactttccgacaataatcggtaaaccacccgggatccgaccgtcccctcctgaaacggatgatcgaaacgagcgatctcgtaccactcgccgacatacaaatcgggattcgcccacggtccactgccgacagcggcaacgaccggtccccgaccgtacgcggcgcccgccacaagcgacatcgccgcaaacagcatatattcgattttcaccctggtcataacgagggtgtatcgcatattctataccggattacgtctattgcaaagattcctgcaaacttttcagcgtgcggtaaattccctcggcatcataaccgcactgggcatacagttgcgcgggcgttccatgttcgacaaaacgatccggaatacccaggttcacgaccttcggcagatagccgtgctcgcagaagaacgcgacgacggcttctcccacgccgccgcgcaaggctccgtcctcgacggtcaccacacaacggaacttacgtccgacctcgtgcagcaactcctggtcgagcggcttggcgaaacgcaggtcgtaatgggccacccgaatcccgtccgcctccatacgcgcaatggcctcggaagcaaaattgccgaccgtgccgatcgtaaggaccgcaatccgctccccgtccttcaggcaacgcccccgcccgatttccatcgctgcgaacggctcatcgcgccaggcgacgcccgctccgttaccgcgcggatagcggatggcgaaaggccgaccggcctcgagcgccgtaaacatcatgttccgaagctccagttcgttcatcggcgcagccaccgtcagattgggaaccgtaccgaaataggccagatcgaaagcgccgtgatgcgtcgctccgtcctcacccaccagaccgccccggtcaaggcacatgaccactggaaggcgctgaatcgccacgtcatgaatcacattgtcataagcccgctgcatgaaactcgaatagatgttgcagaaaggcaccatgcccgcagccgccagtccggcggagaaagtcacggcatgtccttcggcgataccgacgtcgaaacaacgctccggcatctctttcatcagaatattcatcgaactgcccgacggcatggcaggcgttatccccacgatccgctcgtcggcacgggccagatcgagcagcgtctgtccgaaaacatcctgatatcgggccacctcggtcttgctgacgatccgctcgcccgtttccggattgaatttgcccggagcgtgccataccggcttattgcactcggcaggcttatagccctttccttttacggtcatcacatgcagcagcttgggaccctcgatgcgccgcaaggccgccagcgcccgcaccagttccggcagattatgcccgtcgatcggaccgaaatagcggaaattcagactttcgaacagattgctgttcttcaacagcccttgcttgacggcattgcccgctttctgacaaaaccgcaaaacagccggcgtatgggacaaaatccgccacaaacggcgtttgatagcgttgtagcgcctcgacgtcgaaatcttgaccaggtagttcttcaaagccccggtagcctggtcgatggccatgttgttatcgttgagaatgaccagcaggttggtctgcttgctcgctccggcgttgttcaacccttcgaacgccagaccgcccgtcatcgaaccgtcgccgatcacggccaccacctgccgctgctcgcccttgagttccgcagctttggccataccgaacgccgccgaaatcgacacggaggcatgtccgccgccgaaagcgtcgtaaggactctcggacatacgcgggaagccgctgataccgcccagcttacgattggtccgaaacgcctcgcggcgcccggtaatgattttatgggcataggtctgatgccccacgtcccacacgattttatcgtcaggagtattgaatacgtagtgcagagcgacggcaagctccaccgcccccaggctcgaagccaggtgtcccggattggacgaacattgctcgatgatgtactgacgcagttcgtcgcaatactgacgcaagtcagagcccgacaacttcttcaagtcatcgggcgaatcaatccgatcgagccatttatattccgaatgcatcatggataggcaaagatagcattaaaaaacgacattttttcgaaatttttcctatcttcgcattatcaaattccgctccgcttatgaaatacgacagaatactcctgaaactcagcggcgaatccctgcaagggattcagaaatacggtctttcgaccgacgtgctccacagctatgcggagcaaatcaaagccgtcgtccgaacgggagtccaggtaggcatcgtcatcggcggcggcaacatcttccggggacttcagggcgcccgcaagggattcgaccgcgtgaaaggcgaccagatgggtatgctggccacgatcatcaactcgctggccctgcagtcggccctcgaggacaacggcgtgaaagcgaaagtcctcacctcgatccggatggaacccatcggagagtattactcgaaagccaaggcgctcgaatacctcgaagccggatacgtagtcatcatcggcggcggcacgtcgaacccctatttctcgaccgactcggcatcggcgctgcgcggcatcgagctcgaagccgacgtcatgctcaagggtacgcgcgtagacggcgtctatacggccgatccggagaaagaccctgctgcggagaagttcgacgaaatcaccttcgatgaagtttatcgtcgcaacctgaaggttatggatatgaccgccttcacgctttgccgcgaaaacggcctccgggtcatcgtcttcgacatggacactccgggcaacctggaaaaggtgctcgccggagagaagatcggcacactggtcaaactctgaaaacctattatatcgctatgaccgaacgtaaaaaacccaataacaaacgtcttatcctgatgatcgtcctgctcgcggtcgtcatcgccctgatgtggctgctgcccgacggatcgcagcccgcagcccccgcaacgaacgctccgaagaccgaacagaccaagaatacgaacgatgcgcccgacgacatcgaggctacgacccttgttaaagccgggacacaggcacccgatttccgggtggaaatgttcgacggcacgaccttcaccctgggcagtctgcgcggcaaagtggtgcttctgaatttctgggcgacctggtgcggtccctgccgcgaggaattgagccgcgtacagaaggacatcatcgaccgcttcaaggggaacgaagacttcgttttcctgcccgtatcgcgcggcgaaacccgcgaaacggtcgccgctttccgggaaaagatgggttatacgttcccgatgggactcgaccccgaacagaaaatttacagactttacgcctccaactacattccgcgtaatttcctgatcggcaaagacggcaaagttatttccgcgaccatcggttacgaggcccccgaattcgacgaactcattctgctgatcgagcgacaactcaactccgccaactaaacaaatacgacatatggataccaaaaccattctttccgaagcttccgaccgcatgcagaaaacgatcgagcacctcgaagaagagctgctcaacatccgggcaggcaaggcgagcccgaccgtgctgaacggagttttcgtagattattacggatctcaaaccccgatttcaggcgtggcaagcgtcacggtacccgatgccaagaccattctgatccagccctgggacaaaaacctgatccgcgcgatcgaaaaggcgatcatcgactccaacatcgggctgaccccctcgaacaacggggagcagatccgactgtcgatcccgcccctgacggaagagcggcgcaaagagctggtcaagcaggtacgccaggaggcggaaaccgcccgcatcagcttgcgcaacgcacgccgggacgctgtcgaagccttcaagaaggcccagaaggaaggcatgtccgaagacgaggcgaaagacggtgaaacccaggcgcagaagctgctcgacaagttcaccaaatcgctggacgcgatactcgacaacaaggaaaaagagatcatgaccgtatagatacgctttctccgagaaaccgaacaccccgacgcataaacgccggggtgtatctttcatcagaggggggatttttatatcaggtaccccacccactcaagaaaactcgcccgtcatacctctgcgattcgaaaaaatcaccacgcacaaaaaacgcttcctcgacctgctcctgctggccgacgaacaggaatccatgatcgaccgctacctggaacggggcgaaatgttcgtagcccgtgacgacggacaggtcgtcgccgaatgcgtcgtcacggacgaagccgacagaatcggagagatcaagaatctggctgtacccctccagtatcaacggaaaggatacggacgacaaacgctcgaatttctggaggcgtactaccgggggcgttaccggacgcttctcgtcggcaccggggatgttccccgcacactccgtttttacgaacgatgcggatacgttcgctcgcacttgatccccggcttcttcaccgatcattacgaccaccccatcatcgaggacggcagacaactggtagatatggtctatctgaagaagtccttgtaacccagcacacaccggctccgcctgcacaaaaatcgtccgcaacggacaatcccgcccgatcgggctattttttaccggaatcgtctgaaattccgcctttttttaataccttcgcggcaagacaactatgaaactcattcttaaaatatcgctcgcatgcctgctcgcaacaggctgcgcatcgaaaatttccgcccaaacctacgtcaaactcaacggactctatgcgctcgtgggcgtagtcaatcccgccgtcgaattcacgctctcccccaaatcgaccttccagaccgaaatagtcgtttctccgtggaagtcgataaacaaccatcacgccctcttttgtatcttcatgggcgaataccgccgttatttcaaggagcacaaccgaggctggtacctcggagccaatatcggcatgcaggctttcgacctctcgaaaccctacatcgaaaactggaagctcaaattcgaaaaccgatacagcaaaggctacggattcatgatcggcctctgcgtcggctacgaacatatcttccgcgaacgctgggtgctcgacgcctacctcggctggtcgtggatgagcagcttttacaacggctattccatggacgggaagatagacatggatcccggccatcaggtcgaaccccaataccccgatccgttcaacggttcgtcggagtggtatcccaacaagatcggattgtcgatcggataccgtattttcaatccacacaagaaaaaatagttcggcaacaactcgtcctgcctccgcgctccccaaccgattcgaatcacccgccgcacggacatcgcttccgtatcgtcatttttcaaccgtatccgtaatttttcccggtaaattttggcgggggggggaattacttatatttgcagcggaaactcattcgcccgggaatacatccacttttccccaagaacgtttccgaacaaaatataaaccccaagcaaatatccctaaacaatgaaaaaaattcttttcacgctgttcgccctggtattggcatccggtatcgccgcccaaattcccgaacccgatttcattggcgaagtattggcgattcattcggacggcacggctgaaaaattggaaaaacacaatgtcaaaatgcgcaccggagccggagtgtatatagcaggtctggccgtcaataagtcgaaaactaaaattctcgtcgcaggtagtcaagccaacgtacgcttcgcagccgacgaaccggtcaatctgattgtccgcgccgtagacaacaaaaccgacccgatgtcgatcgtacgggtattcgccatgaagaacaaccgaaaacaacgctcggcagtcatctcggccgtaggttcgttcaacgtcacatccaacgatatggagtacctgccctttaccgcagaaaaatacggagaaaactcctattacctgactttcggagatgcccctgccggtgaatacggcatcatcgtcaccaaccccaacaatgtcgatgaaaaaatgatcatcgtatcggctttcggaatcgatccggaaaaaatgcctgctgcatccggttccgaaacggcagaggacacagagtaaaacatccggcaaatacggccctggaaacgacattacgatatcgcactccacgacagcctacaacaaaagaacccccgccgcaagcattggtcttgcggcggggattcttccattaaacggggattacttgcggtaaaccttggtatagccgtaaatcgcctcgtcaccgagctcttcctcgatccggagcaactggttatacttggccatacggtcggaacgcgacatcgagccggtcttgatctgacccgcattggtcgctacggcgatgtcggcgatcgtcgaatcctcggtttcgcccgaacggtgcgaagtaaccgacgtatatccggcacgatgcgccatctcgatagcgtcgagcgtttcggtcagcgtaccgatctgattcaccttaatcaggatcgagttcgcgcatcccatctcgatacccttgcgcaggaaatccacgttggttacgaacaggtcgtcgccgaccaactgacacttgtcgcccagctcggccgtcagcatctgccaacccgtccagtcgttctcggacataccgtcctcgatcgaatcgatcggatatttggcaaccaggctcttgaggtactcgacctgctctttcgaagagcgctttgcaccgttcgcaccctcgaacttcgtatagtcgtaaacaccgtccgcataaaactccgaagaggcgcagtccatagcgatcgacacgtcgccgccctcgctcttgcggcccggcttgtaaccggcagccttgatcgcttcgaggatcgactcgatcgcatcctccgtacccttcagcgcgggtgcgaaacctccttcgtcgcctacggccgtcgagaggccccggttgtgcaacaccttcttcaggctgtggaacacctcggcacccatgcgaagaccttcgcggaacgagggagcgcccaccggacggatcatgaactcctggaaagcgatcggagcgtccgaatgcgaaccgccgttgatgatgttcatcatcggcacgggcagcgtcttggcattcacaccgccgatgtagcggtagagcggcagaccgaaatagtcggcggcagcgcgggctacggccagcgaaacacccaggatggcgttggcgcccagcttcgatttggtcggcgtaccgtccagcgcgatcatcgtcttgtcgatgcccacctgatccgttacgctcataccgacgatcgccggagcgatgatgttattcacgttctccaccgccttctcgacgcctttgcccgaataacggctcttgtcgccgtcacgcagttcaagggcttcgtgctctcccgtcgaagcaccgctcggcacggctgcacggccgaatgcacccgatacggttcttacttcgacctcgatggtcgggttacctctcgaatcgaggatttctcttgcatggatctctacaatctgcatagctgtaattttttgaattttataaaaaacaatttcgttttcaacggtcgtttcacaggtgcggcatctgcctgcaacctcggttgtctgccggatcgcacccaccggacgcacgaaaagtcgcaacgaggcggatccgaattccgaactgccgcagcgcaatctgtcgaaccgtgcaaagataacgatttttacagacaaactgttattcgaataacattatttctcccttcgaagtcggttataagaaacggcaaatccgacgccaaaaacttattttatcaacgaaaaaccttttttattaccgatattttcttatcttcggtatagaaaactaaccctaacttcgatcgtatgaaaaaacttctactctgtttgctggcgataacggcagccatctccaccgcatgggcacaaacgcccaaaaagaatattttcggccttcgggtcggtatggatatgagcaaaatcagcatcctggataccggttccggagagaaatacctgtcggaattacgcacttcattcaacatcggcctgacggaccaggtccggcttttgaacgacaagcctttctatttccagttcggcctgatgctgcacaacaagggaggaaaagtccaagctaccgacggcggctcggacattgagctctccctgaacgcaatgtacctggaacttcccgtcatgctcaactaccacatccggctcgccccgaaagtcgctgtcattcctttcgccggattctacggatcgctgggtgtggacggcaaacagtcctttgacgacttgggacttgaaatccaacagaatttgttcggcaaaaataaaatgtttcaacgcggagacttcggcgggcggataggcatcggattaagcatccactccgtctatatcggcgcctcttacggcggcggtttcctcaacatcgcccaggaagacgacacctccaaattccgcaaccgcagttggtccctctccgtcggctacgatttttaacccgtctgtctttttatttcattaccgaaagtccgtatcgggacctcgccccggtgttccgaaacagacataaaacggccctgaagaaaacttcagggccgtttcttatcgtttcacggaaagcggcaggtccgcgcctccggcatagaacatcaccagatcaaccggcaccgtcccctggttttcaccatagtggaacgtattcaccagctcgacgataccgctgcccgccgaaaaagtcttcgacagaccgttttccgcaacaacggtaagttcgccttgcagcacgacaccggcattgattacgggatgacggtgcatcgccagccgttcaccgggagcgatcgtaatccgaagaatcgtaatacggggcgttcccgcaggataagacggcagcgccgtgccgtcccaactctcggaagtatcgacgatcgtcgtggaaccggtccgtgcctcgcgggagtccgccgacacaactccgcccgattctccgcccggatcgccgcgcagctcccgcaacggattacgggacactatttcagattcttcttgcggatcacctccagcatatcgtccgtcatgctcgacagatcccactcgggcttccaaccccactcctcacgggcgcaggtatcgtcgagcgaattgggccagctttcggcaatggctttcttcaccggatcgacgtcgtaatccatcgtgaagtcgggcagacgcttcttgatctcggcatagatgatctccggcgtgaagctcatcgacgcgatgttgaaactgttgcggtgtacgagcttcgtcggatcggcctccatcagctccacgcaggcacgcagcgcatcgggcatgtacatcatgtccatatagacatcgcccggcacggggcaggtgaagcggcccgaacggatcgcttcgtagtagatctccaccgcgtagtcggtcgtaccgccacccggaagggtcacgttggaaatcaatccggggaaacgcaccgaacgggtatccacaccgaaacggctgtggtaatagtcgccgagcatctcgcccgtcaccttgcatacgccgtacatcgtcgtcggacgcatcacggtatcctgcggagtcttgtccttgggcgaagagggaccgaacgcgccgatcgaactgggggtgaacagcgcacagttatactgacgggccacctccagcgaattcatcagcgcaccgatattgacctgccatgccgtctggggcttcgcttcgccaacagccgacaacagggctaccaggttaaaaatcgaatcgatcttctgacgcgacaccatttccgccattgcattggcatccagggcgttcatcacctcgaaaggtcccgactcggcaagctgcttgcactcgcgcacgtccgttgcgaccacattgtcgtttccgtaaattttacggagataagttgttaattcggaaccgatctggccaccggcacctacgattaagatacgtttcatatatttttagttataaaccggaagcaaagatataaaatgattatcaattccgaactttttcttcgcacttttcaaatcatagaatccgggccgcttcccatcttattcatactccatccgtactatgcaaaacgttctcaccgcagaaagacatgcccccggcggggcaagcggcaaaaaatcccgcccggggaaacctcgggcgggatatcgttgttcgtatcagccggtacaaccggccggaaagcatcgctaccggcgacaggcatcctcgcgcccgctaccgttgtgacgcagaaggaccattactgaatcgtccatgcattggcaggattctcttcgccgtagcccatcacctctttccaactggtcttcagttgatctctcttagcctcggactcgacgataatcgtctgcgaatcgtagccggaccagtagaaaccggactcgtacgtgccataattttgaatgcaagtagtcagcaacggacagttagcgatattcacttcagccgtgccgccgacgtagagtagcgcgagcttgctcaatccggatacattcagcgacttcagcgctgcgggttctccgtagctatccattacgctcacatattccaagtcggtatattgagtcagatccaatgtcgtcggaccaaccggttcatgattagcatatttgataatcgacttaaagcttttaattccgtcaggcagttggatcgaagtatagcctgcggtcggcgacatagtcacatcggtcagtttcgtaaaagccgacaggtcaatgtcgcccaacgaaacttgccatgcattgatcgacaactttgtcagattggtacacaaatccaatccgtcgagggtaagtccggtagcatccatagaagtcgttatattgatctccgtcaccttagccagcatctcctccgtaatcaccgtattgatatctccgacgggattgacggtttcgtcgtccagaatagccttgcgcagcacggcattcatcgacgcagcagcctccgtacgctcctcatcgacgcaccaccaggtaacggatacgccatagtcggaatactggctggccatcgcagacttttgagccagcgtagcgatgatcatggtaccgtcggcgaacatattcgtaccgctggatgcatagtcagccgatgcgaaagtggtaatgggcatctcgtggatgtccacggtcgtcattttggggcaagactgcaaccagaacatttcgacagtcgatgcggaaccggtcaaatccaaagtttcgagcgatttggctccctcgacaaccactttcttcaatgccggacaattggaaagattgatcttggacaagttggcctggtcgttggagaacttgagctcaaacgtcgtcaagttttcaagcccactcacattgagactcgaccacaaaccattggccggagagagcgacacccttgtcagcttcttattgttcgacagcgtaataccattcagttcgtcgcaattcgaattgacaacaagcacctccaagttggggaaacgctcaatatacatcaaactctttaccttgcccccgaaaccagtcgaataaatttccgttacgctttcggcctcagcctgcgagagcagaccgtctccattcgcatcgtattcactcaacagataagcacgcaggttggtgtccatgcccgaagagaggtcttccgccttgaactccgtcacattatagagtttattggccgccgtggtcagcggagtcgtgaacttacgggtcaaaatctctttattcacatcaccggcatcccaactgtaataactgtgaacgatcttcagcgaaacacccttcgtaaactcgatcccggcaggtacgacaaaatgcacctcggtagcaacatccgtcttgagcgttacgtccgatgcacaagtcaccgtaatggatttaccctcgcccgagaaagtcatggcaggcacttcaccactgaaatccagcgcataagcaccggcgatagactcgtcgttgttacccgtaaggatcagtttgttgaacgtatcggtacccgtcagtttgaaacgcagcacggcacccaccgaacggaacgccaacgatgtatgatcttcgcctacggccgccatcgggttgagcgtcgtagcgaaagttccctcggcgaacgtctgcacggcaggaatctccagaccggaaacggtcgttccttccagcgtagcacctgcagcataaggataataggcgaaagccttcgcagcctccgtaccctcagcatcggtcgcatcgcccgtgaaagtcgcggatgcagcgttgtcatccttggtggtaaatttcgcgttcacgaacttcgtcccggagaaaataccgagcgcatcgttcgccgaccaccgtacatcagcaccttccaacgaagtacgggtaccttctaccgaagcggtgatttcatagctccttgcttaacttccggcgcaaccgtcgtatccttcgtacaggaaaccgaagcagccaaaacggctgcacaaccaaaacaagctaaaaatcttttcataataattcggaaggttgaggggttattcataggtttcctcttcgaacgaagcgacagaattgccgaaaccgttctcgattgcaaattctgcaatacttaactccggagcgacgtatgtcctccgttccgcaacatttaatttttccataaacgattaaaataattaaggttaataattgatgaattttcagcaataaaattattatttttttactatcaaaacaatttcaaagtaaaagaaagcaagatttctttgacattcaaaatattacatcttgaatatcagcatcttaaacactaatcaattgtgcttttttttgtttatagaaataaattgttaaatcagaaaaaccaatacattttccagcctggcaggaaaagacacaacctgtataaaaaactaatgaattaattttgtgtcacttacacaaatacgaagaaaaaacgggaacgcattctgcgataaaaatccgccgatttttttgttatttcatttttgttatatacttttgcaccactcgaaatcgagaaagttgctgttttagctcagcggtagagcacttccttggtaaggaagaggtcccgggttcaagtcccggaaacagctcgaagaaaagagggtgtctgacgaaccgcagacaccctctttatttatttttattcgtactcttatctagaaatcatttccgaatatgcgattctcggaagataaaaaacttgccagcccctttacagcctcacgctcaatgcagacgccatagctaattcgaacgactttgccgcgttgcaggcacaaaaaagctgtgcttccgtacaacatttcgccccgtttccactcttcggcagagcccgctcgacttcgcgttaccgcatgccgcccgtccttccctccgttggaccggaggcgaccttgcgaactcctgattttcgcctgccagccatacgaccaacttttatcttcagaccgctccggataaatttgtccaccccgaaaataaaaaaggttgcaaacgaatgtttgcaacccagccgaccacccggtcgtttgcggagagagagggattcgaacccccggtacagttgcccgtacaccgcatttcgagtgcggcccgatcgaccactccggcatctctcccggtccatcaccaacccttcggccggtaattcggagtgcaaatatagctatttttcgcaaaaaaagcattttcgggacaaaaaaagattcgaatttctattttcaccctcccaacgtatttcccgattttattgctatttttgtgaggtattgacccgccggcaataaaaccggtacgattttcgttgaaaatataaccacacagtaactccgaaacacgatgaaaaaccgaaatttcaaaataggtgctctgctcgtgtcgctcttcgcggcaagctgttcgccggcactctaccaatccggcacctacaacatcgacgacatgtacgcggaacacgatgtcacccgcatcgcccaggaaaaacaggcgatagccgaagctcgcaaggccgaagcggaagcccatcgcgccgaaatagaggcccggcaggcggaagccgcatactacgcatcggacgactcctaccagggcgtgctggccgacacgtacgaaagcgcctatgcccgtcgtttgcggggattcagctccccgacctatcagatgccgacgagctatttcaaccttcgttacaacggcacctaccaattcgtttcggcctacgacccggccgtttacaacatcatcgtcatgggcgacgaagtgtgggtcgaacccaaatacattacttcgatgttcggcacatggggttctcccagcatagtgagcttcggatggagcgcaggtctttacaatgactggtatttcagttggggttacaatccctatccctgggcataccccggttttggctggccttattacagctacaacccctattgggggtatccttactggggaggctattatccctattgggggtattatcccggctggggaggcggccatcaccaccacccgtacccgccgcaccatcggcccaacgtcgtacaccgctctacctaccggtacggatcgggagcgggatcgaacatcggatcgaccagtttcggagggcgcggccagggtagtttgaacaacggctacagaaacggcactacggtcggcagcggcagcttccggggcggcaggaccaacagcaattccagctccagcttccgaggcggctcatcgtcagtcaatcgaggcagctcgacctaccgcaatccttcgttcggaggcagcagcagctcctaccggggaagcagttcgacaccgaacagagggacttacaccccggccccctcgcaaccgaacagaggttcgagcggcagcttcgtgggcggaggcggaggggtccgcggcggaaacagcagcggacgcaactcttacggccgttaaacgatcaccccggcaaatttcgacggacggcgcacaggatgcacacgcaggcggcaaacgaatatgaacgcaacgaccggtttcgaccggcagcggcgatcgtttccgcccctgctgtcccgaacgccggaaacgaaaaaaacaactcaacgatttttgttatgaaacatctcggaattttggcgctgctttcagcggccttgttcgcaaccgccccggcgtcggctcaaagctccggaggtttattgatggaccgtgacatcgtcaccccgtccgacctcttcgaactctcgcaaacgaccttcagcctcggaacggcgcggtcgatggccatggcaggcgccttcacctccctcggagcggatcttacgtccatggcgatcaacccggcgggcctgggcatgtaccggcgcaacgaaatttcgatcacgcctctgatgagtttcgcacgggcggaaaacaacgctccgacattcaactccaacagtaaaaaccggttttcgatcggcaacttcggctttacggccaatgtttacgaaggatcgggaccgctcgtgagcgtcaatatcgggttcggctacaaccgcctgcaggacctcaactaccaatactcctattatacacagggcaatgtcagctcgatcgccgacgttttctccgacatgctgcaatacagcggtatcaacagggatcagatcaccggcggcttcaactggagcaacttcaacccccggctctggggttcgatcctcggctacaaggccggattcacggatcaaatcggcggcaggtggcagccgacctggatcggcaacaacgtcgatatcggcaactacacgaccgtcgtaagcaatggctcgataggcgaatacgacatttcggcaggattcaacctgaacaacaagttctatatcggggccacgttcggcattcagtccctgtatcaacgcaaaacctactattacggagaagattacgtctatcccggcaacggcaccgatccgaacctggactaccaactgctctattcgaacttcaaccaggaagtcatcctggacggcgcaggggtcaacttcaagctcggcatgatctaccggcccattcagaatctgcgaatcggcttcgctttccacaccccgacctattactggatcgaccgtacctatcaggcctacaccgattccggggtgcatgtcaataacccgaacgaccccgacggtctcaaaccaggtccggacggcaaccaatatacggacgccctctctcccgtactggaagatacgggcggttacaactgggagttcaccacgccggcccgcctgatgttcggcatctcctacgccttcggcaaccggggtctgatctccgtggattacgagcgcgactggtacaacgggatgcggatgaaaaacaatcctgcgggcggcgataacgaaatctataacgacacgttccgctcctggtacaaaggcgccaatatcgtccgcataggcgcggagttcaaaccgctgccgttcctggcgatccggggcggtttcggctacatggggtccatgctgcaggacgaagagcaagtttcagcggcccccatgaccaagcagatgctctactattcggccggcttgggatttttactctctccgggcgttgcactggacctggcctacaactattcctcgaccgagcagacggactacaacctctactacttcgaatctccgagcggcataaacggcagcggcatctacaataccaaactcaagcgccacttcgcggccctgagcctcagcttccgcttttagtttcgcacgacatatcgcaacggcagaacctcccgtaccggaagtcctgtcgttttttatccgggacagaccggatttcgggccagagaagaaaacgcaccgacttcaaaaacgcaaaacgagccatcggcaccttcgaccgacggggcaaagcggcccctcgcagcgggcaaattcaagatttatcggagcgcagttgcgaatttctgcataaatcgttaattttgccgactaaccgacatacgccggctccgaagccggtgacacgattcccggaagttaaaaaataaataagatatggcaaaggaacttaaagacgtaaccaaagccgaggacaactactcgcaatggtacaacgacctggtggtcaaggctggtctagccgaaaattcggccgtacgcggctgcatggtaatcaagccttacggctatgccatctgggagaaaatgcaggcggccctggacaagatgttcaaggacacggggcaccagaacgcctatttcccgctcttcatccccaagtcgttcttctcgaaagaggccgaccacgtggaaggctttgccaaggagtgcgccgtggtcacccactaccgcctgaaaaacgatcccgagggcaagggcgtcgtggtcgatcccgatgccaaactcgaagaggagctgatcgtccgtcccacctcggaaacgatcatctggaacacttacaagggctggatccagtcctaccgcgacctgccgatcctctgcaaccagtgggcgaacgtcgtacgctgggagatgcgcacccgcctgttcctgcgcacggcggaatttctctggcaggagggccacacggcccatgccacgaaggaggaggccatcgaggaggctacccggatgatccacgtttaccaaaaattcgtcgaggagtggatgggcgtaccggtaatcgtcggtcacaaatcgccgaacgaacggttcgccggtgcggtcgataccctcacgatcgaagcgctgatgcaggacggcaaggccctccagagcggcacgtcgcacttcctgggccaaaacttcgccaaggcattcgacgtacaatacatcaacaaggagggcaaactcgaatacgtatgggccacttcctggggtgtttcgacccgtctgatgggagcgctcatcatggctcactcggataacaacggcctggtgctgcctccgaaactcgccccgattcaggtcgtcctgatacctatttataaaggagaggagcagatgcggcagatcgtagaacgtcttcgcaccatcgccgaagagctcaagtcgaagggactctccgtgaagatcgacgaccgcgacaacgtccgctcgggcttcaagttcgccgaatacgagctcaagggcgtccccgtacgtctggctctcggcccccgcgacttggagaacggcacgatcgaactggtccggcgcgatacgctcgaaaaggaaaccgttccccaggagggactcaccgaccgggtggcggccctgatggacgaaatccagcagaatatcttccgcaaggcgctcgactaccgcaattcgatgattaccaaagtggacacgtgggacgaattcgtcgatgtgctggaaaacaagggcggcttcatctcggcccactgggacgggacggtcgaaaccgaagtggcgatcaaggacgctacgaaagccacgatccgctgcatcccgatggatgcggtcgaggaggagggcaaatgcgtattcagcggcaaaccgtcgcatcgccgcgtacttttcgcccgcagctactaaacgctgtcgataccgaattatcacaacgaagacggatgccattcagagaagtgtccgtcttcgtttttgcaggaaacaggtcatgaactatcaaaacgattcagtccgtcggcaggaccgcttgctcgaccaaccggaggcgacggagctgttgcggcggggcgaatacggcatactctgcatgcagcgtcctgaaggcggcggctacggagtgcccctcaactatgtctgggacgaagccgacgcgatctacatccactgtgccccggaaggacgcaagttgcactgcctccgggaatgcgaccgcgtcactttctgcatcgtcggcaaaacgcaggtgctgcccgcacggtttacgaccttctacgaaagcatcctgctcgactgccgggcccgcacggggctcacagcggaggagcgtcggagggccctgaaccatttgatcggcaaatattccccggagtacaagacaatcggcaggcaatatgtcgaaaagtctttccaccggacagagattatccggctcgacatcctgtcgtggagcggaaaatgcaaggataacctacatccgggtgcgacaccgcccggagcaaacagcaaccggacatgaatcaacccacggaacgcacccgaaaaatttaccgggcaacctggatcggaatggtcgtcaatatcgccctctccctcctgaaactcgcggccggcatcctcggccgaagcggagccatgatcgccgatgccgtgcactcgatatcggatctggcgaccgatgtcatcgtgctgatcttcgcccggatctcctccaaacccgaagacgccggccacaactacggacacggcaagtacgaaaccctcgcctccatcctcatcagcctgaccctgatcgccgtcggcggaggcatcctggccgacagcatccgcaacatccgtctggtattgaccggagaaataatcggacgaccgggcgcgatcgccctgatcgccgccgcaatttcgatcgtcgccaaagaggtcctgtatcgctataccgttcgtgtgggacgtcagacggacagtccgagcgtcgtagccaacgcctggcaccaccgcagcgacgcactttcgtcgatcggcaccctgacaggtatcgggctcgcctattttctgggcgacaagtggcgcatcgccgatccgctggcggccctcgtcgtttcggtcttcatcttcaagatcgcgttcgacctgctgcgaagcggcctcggagaactgctcgaacatgcccttcccgccgcaaccgagcaggagatactgaacatcctgactcactcgaaggaggtgaccgaaccgcaccatctgcgcacacgccgtatcggagccaccgtcgccatcgaagcccatatccgcgtcgatcctcggatgagcgtgctccgctcccatcaactgaccgtcgatatcgaacgccggctcaaagagcgattcggccccaatacgctcatttccattcatgtagaaccgatcgaaactgaaaaactttcatcttcggactcggagaaagataaaaatatctgatagattttatttttggcatagttattgttaattcatcgataccctgccgaaaaaatagaaatctaaaaagtttgttttttgggataattatttctacctttccgacacaaaagatgtcgaaacgggtatccggcgcatcaaaaaacagaaacttaacaacttaaaagattgcctatcgaaacattctactcttaataactaattcaggagaaaagagtatgaacattcaagtattaagcgaccagcacttgcttaataattatcgttcgggtgatcagagtgccatttccaaattgatcgagcgccacaagcgtcgggttcgggactatatttacatgatggtcaaggacaacgacgtagcggacgacatcttccaggaaacattcatcaaagtcatacgcgtcatcgacgaaggccgctacaccgacaacggcaagttcctttcgtgggttctgcgtatcgcgcacaaccaggtgatcgaccacttccgcgcctgcaagcagaacaagcaggtcaatgaaagcgaaagcggctacaacgtactgggatcgctgcgtttcgcggaaaagacgatcgaagatgaattgatctcctcgcaaatcgaaagcgacgtgcgcaacctgatcgaactgcttccggaggagcagcgcgaggtggtgatgatgcgctactactccggtatgagtttcaaggagatcgccgagcaaaccggcgtaagcatcaacacagcgctgggacgcatgcgctatgcacttatcaacctgcggcgcatgattagggaaaaagaacttattttatcttaatccgtatgcaataaagcccggaggccaccgtttctttaatgtaacgaaagaagaaatactaaaagggcctcctatgattgaaaacgacaaaacggatacatcaaggtctatctccgacgaagaactgatgaagaacgaagtgatcggcgacgatgcagatctgtattatctcgattgctatctttcggacattcttggaaagggataattttagggttaatttttgatgggaggaggcgacaagatatcttgtcgcctccattttttataccggtttcatccgacgactaccgccggagagccgcacgcccacatcctgtcacaacccctgcatctcctcgcgcgtgatatgcacctcgacaccgcccagggcatagcatccgatgtcgtaaggattatagtaaaacgtaatgccgtcctcggtcacttcgaaattctcggtcgtggaaatgtattcgggaaaaaatccctgcgccaccagaccttcgtcccccgtgacaccgaactgttcgtaaagcttgttgcggatcaacccgatcaaagcctcctgtcgtgccgcatcgaacaagtcggacaaagccagctcataaccacccgcaatggaataattatggcaattgatgctgtacataccgtgcgcaccgcccgtatagttcgaactcgaaatcgtatagaccagcaacgtatccaccacacgggcctcggactcgaccgccatctccatttcggtttcccactggggtaccgactcatccagggtaccgatatactcgtccatgaactgcccgatagaccaatcgacagcctcctgcaccccgccctggaaatgctccagtccgaagaaatagagcatattggattcctggatcgcctgcaatgccggagcttcgtcggcattggcgatcgaggtaaaggcatactggaagcgacagggtattccgccgcgtaccgctacggtatccgtcaccacgatatcgaattgcggcatcacggtctgccggcggcacgatccgaaagtcaatccggcaaaaacaagaaaaaggagaatcacacgtttcatacgaatccgaaattttttctaaacaagatataacgaatgtcccatgcagaaccgcatataatcgggttatgcccaagtacatcctatcttctacaaatgtacataaaaagacggacgaacaaacggcccgagaaaaaaacaacagttttcacgaaaaaaaatttgtaaattcaaaacatcgtattacctttgcaacaccaaatttcaacggtggattcatctaagggttaggatacgtgcctctcacgcacgacataggggttcgaatcccctatccactaccaagagcgactgtaatagtcgctttttttattactgactctccggagcaacgggacaaggggaggagaaccccattcgaacaaacggagcagcgagacccggacgaactccgttcgagccgccgagtcgtgacgtttgaagacaggcgaagcgaaatcaattccctatccactaccgaaaacaactgtaacaggtcactttttattttgcactccacggctccggtacaaagaccgggaatcccgattcgaaccggatgcgcaacggagcaatgcaaagaccgtttatctcgacgcaaggcagcgactcccgatatagaagaagcacaccttgccgtccttcgcccacaactcctgcccaaaagtcgccgaaattaaaaacattccgaaatccgatcggcaaaaatcataaatttaagattaatgacctgcacaagcaatatttcagttcaaaccgctatctttgcaagcggattaaatacataatatatttttcgcatgcccaccgtttcggtcattgttcccaactactgtcatgctccctatctcgagcagcgtatcgaaagtattctgcaacaaacgtttcaggacttcgaactgattctgctcgacgattgttcgacagacggcagccgtgaaattctcgaacgataccgcaatcaccccaaagtttccggcattttctataatgaacggaacagcggatcacctttcaaacagtggaaaaaggggttgtcgaaagccacgggcgattacgtgtggatcgccgaaagcgacgacttttcctctccctgttttctggaacggtgcgtccggattctcgacacccgtccggattgcagcatagttttcaccagcagctatatcgtcgattcccactcccggaccatacgggaggaggcgcccgtcaaatatcccaaacacaaacagatccgattcggcagccgtttcttcctctaccgttttctctgcccgaggaacaccatctacaacgcaggaatggcactggtgcggcgcagtgcgctccctgcggacgacaattacacccaataccgttattgcggcgactggctgttctggatacagatcgtatcgggggggggaaatgtcgtctatcttgccgaacccctcaactactaccgggtacatgacagcaacaccaccgcagaatcgatcgtcacgggacgcaagcacatcgaaacgctccgcatcctcgaagaaaccttccgactcatagacccgcccctgatctgccgcctctcgatcgcgggcaaacacctgctgcggatccgcaaagccgccggcagccactggaacgaggagccctatctctcggtccgcctcgcctggcgggagcgctaccgtcatccccggatgataatgttctggcacaaggtattcaaagatcttccccgcagtttctcccgctaaattcgccgggaatcgatccggcaacgaccggacagccctctaaaaataccgcattggagcgatacttcccatttccggatgcaaattgcaccggaaatgggaaaaaagagttatttttgtaaggtttaacctttaccccgacacaaatgctcatcaccgtcatcgttccgatttacaacatggaagcctacttgtgcaccagcctggaccgcctgttgcagcaaagtttccaggattacgaaatcctgctcatcgacgacggcagcaaggactcctcgggcgaaatctgcgaccgctatgccagggaacactcccggatccgggtcgtccacaaacccaacggaggattgagcacggcccgcaacgcgggtatcgaacacgcccggggcgaatacctgaccttctgcgatcccgacgactgggtcgatgcagactacctgcaacaattcgtcgaagcaggcatggacgaacatacgctgcccgtgacaggcatcctgcaacaccgggaaggcaaatcggaccggcggctgacagcgcctgccatggacgtacagggccaagcctgcacggaagccatcgtcgccctgcggcggcacgacatgctgggattcaccgtcaataaattgctggtcaaacggatcatcgacgagaacgggctccgcttcatcgaggggctctcgcaccgggaagacgaaatcttcctcctgcaatacattccccacgtttcgcgcatcgtcatcaacgaaaaaacgccctaccactaccgagtcctcggcagcggcctctccaaaaaacgcaagccgacggagctgattctccgtgtttcccgccagctacacgaccttttcctacaggccgcacctaccccggaagggcgttatgtcgcagcccgcatccggttacaacaatgctgcgaagcggtcgcggcgtcgaaaacgaacgaggagctgcatattgccgcgaaagcggcccgcaatgcccgcaaagagtatctttcgaccttcgaccccgcgtttctcaccgaccgccgggatcggaaagtcgcagcccgcagccggtgggtcttcgccctcggagctctctccggcaggctgcttcgacgcctcacccgattgattcacatataaacccgctgcatcatgtcgaaatacgattacctgatcgtcggagccggacttttcggcgcagtcgcagcttaccgggccgcacggtccggtaagaaagcgctggtcatcgaccgacggccccacacgggcggaaacgcttactgcgaggagcgcgaaggcatccgcgtccacaaatacggcgcccacatcttccacacctccaaccgcgaagtgtgggagttcgtgaaccgcttcgtcgaattcaacaactacatcaactccccggtggccaactacaagggcaagctctacaacctgcctttcaacatgaacactttttacgccatgtggggcgttaccacgcccgcccaggcagcggagatgatcgaccgtcagcgtcacgaagcaggcatttcggagccccggaacctcgaagaacaggccatctcgctggtcggcatcgacatctacgaacggctcgtgaaaggttacaccgaaaaacagtggggacgcgacgccacccaactgccggcattcatcatcaaacgcctgccggtgcgcttcaccttcgacaacaactacttcaacgaccgctggcagggtatccccatcggcggctacaacaaactcgtggacggattgctcgcaggcgtcgaggtgcgctgcgacaccgatttcttcgccgaccgcacgcactgggaaagcctctgcgaccgcatcgttttcacgggccgcatcgacgaatactacgattttagactcggagagctggagtaccgctcgctgcgcttcgaacacgaaacgctcgacacccccaactatcagggcgtcgccgtaatgaatttcaccgagcgcgaaattccctacacccggatcatcgaacacaagcatttcgaaccgggcggcgatcagccccgcacgatcattacccgggaatacccggccccgtacgaacatggagccgagccctactaccccgtcaatgaccagcgcaacacgaaactttacgaaagctacaaggcgttggccgaccgggaccggaaagtcatcttcggcggccgactcggagaataccgctactacgacatggacaaagtgatcgaaagcgctctcaaacttaccctttagaaaaatgagcaaaaccgtcatcctggtctgcgcccacaagcaggacgcatgcctcaaaaccccgccctaccagcccgttcaggtcggacgggccatttcgcaaacggaacttccgttcgccgtcggcgacgacacgggcgacaacatcagcgaccgcaaccgccactactgcgaactcacggcccactactgggcctggaaaaacctgcacgacgcagactacatcgggttgaaccactatcgccgctatttcgacttcgagggcggttcggcctgctcgctgcggacggttcgctcggaagccttcttctcggcatcgcatccggtccccgacttcgaccgccttttcagccgctgcgatatcgtcatggcccggccgaagatctatccctacaacctctacacggattattgcaagtgccacatcgaaagcgacctgctgaccgcacggcaggtgatcgcagaaaaatatccggcctacctgccggatttcgaccgggtgttcttccgcaacaaccgcctctcgcatttcaacatgttcgtcctgccgcgcgagcggttcgaggcttactcggcatggctgttcgatattctgttcgaggtggagcggcggatcgagattcaggacgaccccgtgcagggacgcgtgatggggtatttgagcgaacggttgctctcggtatgggtccggcacaaccggctgaagatttgctacaaaaccgttctgatggtcaatgaccagaagcgaaaagggctgggcaagcaccttttccatacgacggtcaatactctggcgtactggatcacttatccgctgcggcgccgctcgccgcgtcgggcagcggaataatctgctgccagaagcgccacatccggggcttcgaccagctatggcaccccatcggcaggcgactgccgcacaaacggtagcaatagcggggattggtgtcgaacgcgaaccgcagcgcctcctcctgcgaaggataacgaaacccttcgggaacgacggcccagaaaacatcctcgttgcccaggtggttgcccatcgaacaaaaccgctcgatctcgtcgccgtatttttcgcacgcggcccgaaaactctccacgcggcgaagcgaaagacctccgtttccgatcttcccgtagagcgactgccggatcatccggcccgcccgctctgcacggcgaagcctccaccgcaggtattgcttcagaatcggcagatcatacactttgcggcggacccagggagcggccacacagtcgtatcccctacggcaccagtcggcgagttcgtcccggaaaatccaggcgtcggtatggcagatcaggagatattcgtaatcgcggaacaactcgtagaatccggccgaaagcatcatccggttgtatcccgcaatcccgttcttgcggcccagccattcgtccgacacctcccgaaccggcagtccggagaactcacgccggatcgccgagcaatccataccgcagggaaccaagagttcgaccggataattttcctgtaacaccccaacagtctgcctcaacgacgcccgttcccagacggtcaattccggccggtaaacaggaacgacgaccaccacttccttcttatccatacgctattttttcaagtaatttacaacggcatcggcgatacgctcgccgtcgagcgccgcagaaatgattccgccggcatacccggccccttcgcccgcagggaaaagcccggcgacctcggggtgcatcagcgtctgcgcatcacgcggaatgcgcacgggggtcgaggtgcgggactcgacgcccacgaccaacgcttcattggtcaggaatccccgcatccgccgcccgaaagtggcgatacccgcccgcagggaagaggcgataaatccgggcatccacttatccagccgggaaggcacaacgcccggtatatacgaggtccggggcagcgaaccgctcgcacgtcccgccacgaaatcggcgacacgctgggccggagcgatctgatgctcgccgccgtattgccgggccagccgctcgaactgctgctggaatttcagcccggccagctcgccccactctgcccgcagatgctcgaaatccgcaagccgcacctcggtcaccaaaccggaattggcgaaaacggagttccggccgctgggcgacataccgttcaccaccgattcggccgcatcggtcatcgccggaacgatgaatcccccggggcacatacagaacgaatagacgccacgcccaccctcctggctgaccaacgaataggaggccgcaggcagatactctccccgcgactcgcagtggtactgtatcgagtcgataagcgcctgcggatgttcgatccgcacgcccatcgcaaaaggcttggcttccagacgcacgccccgccggtgcagcaactcgtaaatatcccgggccgaatgtcccgtagcaagaaccacagccgctccttcataaagggtatctccgacccacaccccttttacgcgatcgtcgtgcaattcgacatcggtaacccgcgcatcgaaaacgaacgatccgccggcttcgagaatcgtccgccggatattggagatcaccctcggcagtttatccgttccgatatggggatgggattcgtaaagaatttcgggcgtggcgccgtgaaaaaccagcgtttgcagcgccttgttgtagtcgccccgcttcttgctgcgggtgaaaagtttgccgtcggagaatgttccggctccgccctcgccgaaagcatagttcgaatcgggatcgaccgcaccgttgcggttgatctgcgcgatgtcccgcttgcgggccgacacatcgcgtccccgttccagaatcaccgggcgatacccccgttcgatcagccgcagagccgtaaacaaccccgcagggcccgaaccgacgatcacgacctccgtacgccccgcaaccgacggatagtcgaaatgcacaggtgcgggctgcggttcgcaatcggcataaacttcgagcgtaagattcactttgggctgccgctgccgggcatcgatcgaccgtccgacgacccgcaccaaagccacatcctgctccgcgacacccgcacggcgagccgcctgttcagtatagtattttacgtcggcagcctgcttcggagtaagaaccagtgtcagtttatacggcataatcgattgaaatagtttgcaaaagtaaccaaaaatcggcaaaatcgcccggcatccattcgagaaaaaggttttttagttatctttgccaacagataagaggcggctcgggcaagctcgaatttgtttggcttgtcgcttgctttccttatccttgcaaaggacaggaaccgatccggtaatctttgcggacaatcccgcacgattgcgctcgttttccggtagctttgcaaaggacaggacgcgtttcacgcaccgcctaaatccggttttacacccggcttttgcagttcctgttcggatatttgcggatatggtgtaattggtagccacgtcagacttaggatctgatgccttagggcgtgggggttcgagtccctttatccgcacaaaggagccttttcgaagggctcctttttcgttgcccgttcggtgcaaacaagtgcaaattgattgtatatcatcgttttgcaaaggtgtcggcaaattctctgaaccggaagccgaaagcatttcgcagcaaactcgcgggagcacgaaagggagcggaggcgaaaaacgggctgcgcgacggaatttgctcccgagtacgtttgcaatgcactgtttcgctgcgttttacgtcgtaataattctctcttgcggacgttttgttaaccaaaaaatttcaacgtcatgagacaagagacatttgccattcttttcttgatgcggaaaggacgaccgaagaaaaacggattggcgcccatcttcgcacgcattacgaccggagggctccggcaagaggtctacactcagtgcgacagcaatcccgaaacgtggaaccagcacaaggagcgcgcgatgggaacgaacaagctggccattcaggtcaacgagcgactgaacgatttccgcgtcaaaatcatcgacatccgcaccaagctgctggccgagggctatgcggccaatgcggcgcagatcaagcagcgctacctcaacccgacctgcaacacgatgatgctcatcgcaggcctcgccgactacgcgaagcggcggcagggcgaggtgggcgtgcgcatcacgcagcgcacggccgacaagtacgaacggctgctgcgctacctgaaacagtacctcgcccagcgcggcaaggccgaggacattcccgtcgagcggatgaactacgagtttctggacggcttcaacctcttcctgcaaaccgcccaccgctgccgccacaacggggcggtcgccgtcatggactgtctgcgcaacttcgtcctctactgcctgcgcaacgagtggatcacgaaaaatccgttccgctactataaactcaaagaggacgaggtgcaggccaaagagcaccttacggcgcatgaactggaactgctgacccgcaaggagctcgaccaccggctggcccgcatccgcgacgtcttcgtcttctgctgcctgacggggctggccttcgccgacgccgaccacctgcggcgcgagcacctctcgcaggacgacgaggggcggtggtggatccacaagccgcgcgaaaagacctccgtcatgagccgcatcccgctgcttccggcctcgctcgaaatcctgcgccgctacgagcgggacgaggcgtgcctcgctcgcgggcgcgtgcttcccacgccgagcaaccagaagatgaatgcctacatgaaggagatcgcggccgtgtgcggcatcgacaaggtgctgaccacccacgttgcgcggcactcgttcgcaactgttctgaaaaggtcgggagtttcgacatccatcatttcggaatcgctggggcacagttcggaaaagattacgcaaatctacctcgattcattcgagaactcgcagatagatgcggccatgcaaaacttattgtgaggtggtgacaaggtttgaaaaaaggtctatcttatagcccccaaaactaaatttatcactaccttttaagggattatccgcttgcatcgggtagtcccttttcttttttctgcggtcgtcggttgcggcagaaagcggaattttgtaaattcgtctttataaagatactcctatgcaagaagaacaaaccttttaccccgtaacaaccgaatatttcaccgcttgcctgcccttactggaaaaatatttcggcatcacggcaggttatttcaacaaagaactttcaaatgccaaatgtctgatacctcaccgagagggtaatatcgtaaagtacagcattaaagaggattgcaatctggttttgccgtttcgacacctcgaatgccatgatttgttgtcgcttatcaactcttacgggacaattaccccgataatagaggaagccctattgctggtggcctactgcatccgcgaacagcagatcgacgaaaacgaatacaatgaccttgttcagtttcatacttgggacatataccaaagcgaatgggcgcacctattgctttttatggagcaaatggaggcacggacacttaaaagcaacaaacagaccgccatcacaattcgcaccaataatggggaagcggaacagatttctattccaaacagcaataactggttattccgtctgattaaaaaggaacttgcaagctattttcccgaagtacagacagccgaggaagcacggcaggatattcaacggcgcaaaccgtctgcggggcgagaaaagaagaatgccatctattcggcagttgcatacggcatttaccgaatgctccatgaagaaaacgcaatccccagccagcccaatatgccgaacgaattatgccaactcattcacgactatacacgcgtcacgggttgttatcccaataataaaggagagagcggcaaatacgacccgaaagtaatccgcgccgaccttgccgcctatctgaaacgagcggctatgaaccaagcaccacgattcagaccgataccattgcaaagacaggttatcatgcaggattttgattttccgctattggactgatcggactatataaccataccatttaagggagccgtttatcgcggttccctttcttttttctgccaaaaatctgccagtgtcatgacacctgccattttgtcataacggacagatttacaatattttccctgatatattttgcaatattttcgacagcaaaggtaatgaataggtcagttttcgctggctattatttatatttcgccaaggcaccaaaggtcggatttatgcaggttcaatagccagaatccgcgaataaagcgtacggttattcgagtgattcggggagtagccgacagcccgaaagaggcggcaacaaaacttaataaaaaagataacgattatgaaaacgcttgcaaacatcaacgacaatattaacatcaaatttaataaaactatgactacaatttcagaaaatgcggaatcgcagcaggtagctgggaaccgcgcagaggagatgatggcctcggcaatcgcacacgaggcaaagatggcggaaatcaaagccgccgaggagcaggaggagaaaatgaatcttcgcattatcaaaatcaaacccgcagggaatgccaaaatgttccgcacgctggcgaaagcgattgcggcaggggctaccaccctgatcgtgaccacccgtgtagacgtggctggatgcggctacgtgtggttcggaatccgtaagggttacaccgagttggacgggaagctgttgctcaatgcccaaatctggaactacctgatggcgttcctgatgggtaaggagttgcccgaagtaacggagtttgaacccgaccgtgaaatctgctgtcagtccgagtggctggcagaggtggccgccgaggtggagaaactgaccccgatcacctccgaggagtacaacgagagcgaggagggaatcggctaccttgccaaaaagtaccacttttccaacggcaaagtcgtaatgcctgccgaggcaatggaggacatcaccgacctgctgaactaaactgctgaacgaggggagcgggtttcaccgctcgctccccaagtttttttaactacaaatcaaattattagatgaagattgaatatatcacaatagatgcaggccagcggttcgacgccgtgatgcccgaaataccgaccaactcgatcatcaacaagaccgtcacgggatgcggtgcgacctatgccgaaatcaatgcaccccgacactccgtcatcatcgagccgaatgttcccgttatcgagggcaagatgaaaaagcacccgcagatactcggcgtgttcgagggcgtaacgaccgaggacatcatcgactttctgaacacgaactacaacgacggctacctgaaaatcatgaccacgcccgaaagtttccccaaagtccgctcggcgatggtgcagacgcatacggatatgcacggtgaatggttcatgctgttcgacgagtgcgaacgcacgatacaggatgcaggctaccgcggctctatcacgctcccgatggatgattttttccgatgcaaacaaaaggcgatggtttccgcgacgccgatcatcccgtccgatccccgtttcgagcagcagggatttacgatgaagatactccgcccgacctacgaccacaagccgaaaatgttgctcatacacacgaacaacaccgtcggctgggtgcgtacccttatgggacaggtaaaaggcaaagggcatccgctctgcatctttctgaactcgaccgatacgatccaccgcatgatctgcacctataagatcgagaaacggtgcaaggtcttttgcagttacgagagtgtgaagaaactccgcaagcgggatttttcgcgggcttactcctcgctcgaagaactggatgaaatcaactttttcacgagccgtttcttttcggcggtggacatcgaactgccgacaacagcctgcgtgctgatcgtaaccgacctttcgtttgcggcgcacaccgtcatcgaccccacgaccgaagccgtgcagatcgtcggacgcttccgcaacggcgtggaggatgccgcgcatattttcagcaccaacaaggagatgccctgcaaatcgcgggaggagatcgccacgaggttggaggagtgcgaagcggtctacaaacaagtcctgcaaatcgaagcgtcgggggcgggttgcgatacccgtgcgcaggcgttggagggaatggactacaaacggttcatgaacgccgacggaacgcgcaactggttcatgtgggacaacgcctacgacgacgagcggataaagcaatactacaccgacgccgaactggtgcgggaggagtacgcgaaagcatttcacacggattgcgccgaacatatctatccgttgtcggactgcgaccgactgcaacgcataaatccccgactgaaaatgaaagacttgttccgcgaaatcgtgcggcagttggagatactggaacaaaaccgaacgtggaatgaatactactttctgcgcgaggagattcaaagccaagtgccgatgatggtggatgcctactacgccctcggagcggcagagatcgagcggcacaactacaacatgaacgcaatcagtaaacagatacaggaaaacgaaagccaacaactgctgacctcggaaaaagtttgcggagaggtgtacgaccgactgaaaacgggcgacaaactacccgtgtgcgccgtcaatcgttttatgaacgacctgattatgcggttcggcatcccctaccgcaaaaaagtgacggcaaagatgatcggaatctatttcgagtacagggatgtgcgcaccaacaaacaacggttcatcgaattgggaaagcgaatcatatagcccgtaacgggtgaaaacaggtcggtgacaaacttttgaaaagggtctataaaagtacctttttcggaattcctgtcacccgatcacccactccccgcggcgtgtagaccccacccgtttgagcctgcccgacttggtgagtttctgcaaatgatatttcacgccgtcgggtgagattccgacaacctcggccagctccgcccgcgtaatgctgggattgcgggcgatggcttccaaaataatttcttgggtagtctttcgggtaatttcttgggtagtgagcgtttcggcgattacccccaaaataaactcgacgaaaggcgtgcaacccgctttaccgccacttacggcaatcgccttataatactccttttgatacttatatacaatgttttcgataggcaggtttttgaagataggccgccacctgctcaaaatcaatgtctgccacaatcgccccgtgcgaccgttaccgtccgcgaacggatggataaactcgaattcataatgaaaaacgcaacttgcgatcagcgggtgttcatccgtggtgcgcagccactcgaacagatcgtttacgagaaacggcacacgttcggcatcgggcgcataatggataaccgttttccccgacaccacacccgcaccgcctttgcggaaacaaccgatttcgtcgatcaatcccgcttccatcgtggcatgcgcctttaacagatcatcgactttacagggatcgagcgtgtcgagcaattcatacgctttaagggcgttgcgcacctcctgcacctcgttaataggagcaacgacgggttttccctccaataccgctgtgacctgctccgtcgaaagcgtgttgccctcgatagccagcgtgccgtgaatcgttttgattcgattgacacgatgcagacgcagattttcatgcgcataatagctgccgattgcttcgctgatttgtgcaaccaaattcgtgatcttcggcgtaatggtgtaaggcggtttataggacatggtacacttgcttttcggcaaagatagcgattctttcttttatagggtagttttgggtaaatctatttatcatccactccccatatcgtgcgatttatgccgaaactgccccgcaacaaaaaggtgacaaactttgtgaaagggtctataaaatatccttttcggaaaaggttgtcactcgcagacaaacaaaccgagataccccgaccgagcggacaatccctatttttcacccctcccctcttttcagatggaaaccgaatttttatccatcccatttaataggattccacataaaacagaccaccccctatttatgcccgaaaccatctaacagcataaaattatcggaattatatagaatcgaaaagttatttttacatggagatatgccgccctgtttagttggttatgaatggagttatctttttacaagtaatggggaataactctaaactttacagaccatgaaaacattaacatgcaagtacggtttgggggcaggtacgggaaaacctactgccgaaaggcagtaaggcgttctgtaccgagcctacgaacgggcgagggcggctcaatcatcgaccttgtgccccgtatggagggttgtgccgagggcgaggccgtctaaaagctcgtagtaggcgaacacgaacgcttgtatccctttccgaccaatcgcaaaagacaggctgaccggaagcgctccgccttgctatcctctccgaccgcgaacagatccatccggcattggtcagctatctcacggggcgaggcatagaccctgccatcgcccggacttattgccgcgaggtgcgttacacgatcggcggcaaagagtatttcgccgtcggtttccgcaacgacgccggagggtgggagctccgctccgcacggttcaaaggcggctcctcgcccaaacatattacgacacttgacaacggcagcgatatggcaatggcgttcgagggatttatcgactttctgtcctatctctcgctgaaaggaacccgttaccgtcgattgacagcatcgtgctcaactcggtggtgaatctgcacaaggctgtttcgttcttctcgcgccacagggtcgtccatgccctcctcgacaacgacgacgcagggcagaaagcgttggcccgactgggagaatccttaccctcgtccgaagtgatcgaccagtccgttttttaccgcgaccacaaatacctgaacgaatacctgcaagagaagcagcaccaacaagtgcagcgcaaacagcaaccacacgggcataaggtgcgatagcccgataccgggggggcgtcggacgagcggagggagtggcaaggaaacttcaaggcttgccttgatatagcgaactataactaccggctgcgcttcggtagttgtgggcacttccgagggattcagggctctgccctgaaaacccgcgagggtcctgccttcaacccggcaaagggtttactcctctgcactcccgcggcggtctttcggactgatgaccgccggaaggcccgcacaaatgtaatcattgcattcatttcacaaatgggaagaacgtctttcagacgctctttccataacactgacaattatggcaaagacatccatcaacataaagccctgccttgagcggggcgcacaacagacggttagcggaatatctcgctaatatccgcaagggaaagatctacatccgtaccgacctcatggcgaaaaacgaggaatgggtatcgcctgaactgggcgatacctcgcttgaagaacgaacaggctgatagctgcaatagtcaagaaaaagacaggccgggctgtgcagaccaaagaccgggaacgggtgaacaagaagacgggcaaggtaaccgtagtccgtgacagcacgccaatcaaaaagggcgtggtggtcgtcaaggaagataccgcaatgaagcagttgcagcgtttctgcgatgtgtgtaaggtgcgatggggcattacgccgttgcaaatcttcatataccgcgacgagggacattacgaaatgcccgacgatgaaacctcatggaagccgaactaccacacccatatcgtgtgggacaggatgaaccacaacacgggcaagtcttgcaaactcttgccgcaggacatgagcgaaatgcagaccatatgggccgaagcgctcggcatggaacgcggcacgtccaaagtgcagaccggacgtgagcatctggaacggacggactacattatcgccaagcagaagcaggaggccgagaaaacccggatagccaaagaacaagccgaagcggaactgaaagcggtaaaaggagagctgagaaccgagaagctgaagaactccaccgccgaggtaggtacgaccatcctcgacggtatcggctcgaggatcggcacgtcgaaagtcaagcggcagcaacagcagatagatgaccttacccaaaagaacgaacgcctgcactccgagatacggaggctgaacaagacgatagacagggagaggcgggagcatgaacagaccgccaaaagactgcaaggcgagatagaccgcatttacggttggtttcccgacacgcctcagcttatccggaggggagagtattgcagggagataggcttcacggacaagatggcctgcgacctcgtgaatatgctgcctgtccatttctccggaaagctctattcatcggagcattcccagcacttcgaaaacgaacactcggaagcccggctcctgcgggatgaaaaaggccctggtgggtttcaactggtcatcgacttgatacccattttgcaatggtttcggcaaaaggcggaagaatttttggagcgcttaggaatagagatcaaagaccgcgaacagggtcggggaatgtggatgagatagagtaaaatctatttctgcgtatagcttatatgggcaataccccgaatgagtggttgttcatctgcgaattattttctatttttgcaacgtcgagcgtagtaatgcgttcggcagacatactgaaagtgttttcgcactgtccttgatagaaaatctgacagttttcacaagcaaaaggatggacgaacagcactcatttcttgtttagattatggcaagggatacgtttagtgttcccatactccatatctactcaagtgtggggtattgcgtcgtttatttttgcttgggctttgtcagagccttctatcagataaacgaaatcgactccacactttctttttataaacggggtccgaggagccgggaccgatctttataaaatttttattatgaagaaatttttgttctttttggctgtcacggcatgcctggttacgaccggttgcagcgatgagtacgatgattcggttctgacggaacggatcgaggcgcttgaaaaccggatgaaggagctggaggagttatgcaaacggttgaatgagaacgattacatcacttcggtcgagcctgtgatcgagaacaggaagacggtcggatacgagttgtctttcggtaaaagcgatccgattacgatttatcacggcaaagacggggcggactctgcgattacggaggtgacgcaggatgaacagaacgtctatttgacattgcaggacggaacagtgattacactcccgaaaaaggagtcgtccggtggtagcggcgacggggataatagcggcgagggcagcgatagtggcgatgacggtgataacggcgacgggggtgaagaggcagatccgacgaaggcctccgtcgaagttccgaaggccggcgggctggatttggcgctggaggatgccgatttgctacggatcgaaacgcttcgggtgtcgggatttctgaatgacgacgatattcgttttatatatcggaatttgccgcgagtagcctgtctggatctgtcgcaggcgaaaatggaggtgtgggagagtgccattttcgatgaaaaaacgagtttgaagcatatttcactaccgcaggtggcagaggttatgtcgatggcttgttacggctgttccgcgttggaagaggtggttattcctgaagggacgaccaagatcggaggtcaggctttttatgagtgtcgggcattgacggatgtttattgtcgggctggggtgcctcctctgctgggtatacaggtgtttgagggtacttcgataaagaatctctatgttccggagggaagtgccgatgcgtaccgtgaggcagaggggtggagtctgtttgaacatatcgaggagcgggagttctgattgcggagcgaccgaagcgtaaaaaaacggcaggacagcgttttgggtgtcctgccgctttttgcgaaatatgtcgccggacctccgttttatgtgaagggaagaccgatcgggttggaaaaaaacgctattccatcggccggatgcggatttccgttatgtcggtcagttcccgggacagtcggtcgatgtcggttttctcttcgacttcgccgtaatgataggggtagaagatcgcgggacggatcgccttgactgcatccacggcttgatcgaccgtcatcgtgtagggttgattgacgggcaggaaggcgatgtcgatgccatgcagggctttcatttcgggtgtattttccccgtctccggcgatgtagatgcgtgtacctccgatagtcaggacgtaaccgcaatcctctctttcgcgggggtggaattgctgacggtcttcggaggtgttgtaggccggaacagcttcgatcgagaggtagtcgcgcggggcgagcgtatcgcccggcttcatcgtcaggcacttgcctcccagcgtttcgctgctggtccggtcgcacacgacggttgtggctgcggtggagagagcggcgacggccgcgctgtccagatggtcgtagtgcgagtgggtaatgaggatcagatcggccttgggcagcgacgcatagtcggcgtattggctgatcggatcgatgtaaatatggcggccttcggtttcgatggccagcgatgcgtgtttgaaaaaggtaatcgtcagctgactcccgttcttcgtggtcagcgtgtccgtgggatacgttgccgcctggtgcttgcatcccgaaactgcaagtgtcgtcataatggcgaaaatgaaaagtttcgaatgtttcataaaaggggtgtgtaacctgctctatttttgggtatagttgcgggccaagcctccttcggaggtttcgcggtagaggctcggaatgtccttgccggtttccttcatcacctctaccacgcggtcgtagctgatcatgtggtggccgtccgagaggttggcatagctgttggcgtcgagcgcacgggctgcggcgacggcgttgcgctcgatgcaggggatctgcaccagtccgcaaaccgggtcgcacgtaagtcccaagtggtgttcgaggcccatttccgccgcatactcgatctgcgagggagtgccgccgaaaagctggcaggctgcggcggcagccatggcgcaggcgacgcccacttcgccctggcagccgacttcggcgccggagatcgacgagttggttttggcgacgttgccgaacagtccgcccgtagccagggcacgcaggatgcgcagacgcgagaagttgcgcgtgttcaccagatgatagagtaccgcaggcatgacggcgctcgatccgcaggtcggagccgtgacgacggtgccgcccgaagcgttctcttcggccgtggcgagggcgtaggcatagagcttggcgcgggagcgcagcgtgtcggtgtaactctcggccttgaccaggtaggtgctggccttgcgggaaactttgagtccgcccggaaggactccttcggcagtcagcccccgcacgatggtttcgcacatggcggtccaaatctcatcgagataatcccagattccggggccttcgcactcttcgacatactcccagaaggtttgcccctcgcggttgcaccactccagaatctcggaaatatgggtcatgggatagatgttggcaggaggattcttggcggtttcctcgttggccagagcgcccccgccgacgctgtaaatcacccattcgtccacgggttttcccgctttgaaggcttcgaaacgcatgccgttggggtggaacggcagggagatgtcgggacgccagacgatttcggttggagccacgggctccagcacggagaggatcgccacgtcggtcatgtgccctttgccggtagctgccagcgatccgtacagcgttaccttgtaccggtcggcatcggaagcccgtttgacgaatgcttcggctgccttcttgggacccatcgtatgactgctcgagggtccggtaccgattttatagagttccttgagtgattccatagtaattagtcttaatagaacaaatatagtaaaaaccgcgagaaatcgagaacttgcccatagtttttccgaggcgcatcctatctggagcaaagataatgaagggtaagagataagccaaacttgtttaagctcttttgcttctctttgcagataatatgatctgtatcgttcggaggttgatctgctgaaaattgtggtgttatgcttttggcttaaagctatttttaagaaattttgtttatatttgtaacagtgaaatttttaatatcatttgcctatgaatagataacgataatagcttttttgatttcccgtaccgttcacgcacgaaaagtgtcggtacatacatataaaagcgttagctttatttcttgcttctgaaacttcgacaatttcaaaagtacgtcaagagtaaagtgtgaacgctcacgcaccagcgtgggctttactcatttatttgacgtacaggtagtcgaagacctcagaagcaaataataagttctgtcccacgcttttttatatttctatttcaacctgtaaataaaccatgccgaggggacacggaattatttatgctaaacaatgaaaccgtttattacattgatttgcgtcgggttgttgatgagttcttgtgcctctattttctgtggttcgaaagccaaagttacttttgacggagagatttccgaagaggctactctgacaatcgatgggcttaaacacaccaatgtcacttttccctatacgacaaaaatacgaagaggtttcgacgaaacagtcgtaaagatcgaatcaccgaactatacggcctccccgatcattataaacaaaaactttaacgccgtatcggttataaatctgctcgatgttctcggctggggtatcgacgctgcgacgggcgctatcactaagcccgaattcaaattctatcagatcgattttcaacccaaagaggcgaagacgaaagcatcgtcggtggattagacgtaacttttcgcccatttttccataagtcattttcagaccgtagccaccataggctgcggtctgaaaactttagggcggtcggtgctatctccggctgaaaaaacgtttctgtcggggggctcggtgaagacagttatgtccgggaagcgatttcattggtatttttccggctatcgttatcgctccgctgcggtcgtccgaattggaaacgaatccggagcaggaagggggataaagattcaggcgggaacggtctttcgatcgttacccgcctgatttgcggtcggagaagtcccggatcgctccgcggatttcgacaactgcatggccttcgtaacgtcggcatcgatgccgacggacggcgcctgctattttactgcattaactattgcttcgaatgccttcggctcgttcattgccagatcggccagaaccttgcggttgaggacgatgcccttggcgttgagtttgccgataaattgcgaataggtcattccctgcgcgcggacggctgcattgatacgcatgatccacaggctgcggaatgttctcttcttgagctggcggtgtgcgtaagcatactgcaaacccttctcgaccgtgtttttggctacggtccatacgtttccccttgaaccaaagttacccttggcaagtttcaaaactttttttctccttgcgcgtgacgcaacagcgttgactgaacgtggcatagtaaataagtttttgacggactgtcagcgacgtgattctctcacgttcttcggggctgatttgtcccttgattaataaaattgcgaatccggcccgatgaattatttcaccagcagattcttgatctttgcctcatcggcagcggaaacggtgcccgaatagcacaggttacgcttttgtttagtcgattttttggtcaggatgtgactgtgataagcgtgtttgcgcttgatctttcctgtgccggtgaaagaaaaacgcttctttgcagcggcattggttttcattttaggcatgtcggtaatagttagtttagttatacatagcccacaaagatacgaaaagttttttattctgtcattctgccggggcgaaaaagttatctgtatggcgttatgggtaaaaatcgggattcataagaagaaggggaggagccgtacgaatatcccggggatctgtggggttgccggcgaagggcatcggatatatgccggtccgtatcgtgtgccgcctggaaggtattcgttcccggttttatcggcgggagaacccgtgtgcaggggggtattctggcagatattttcgtatgcctggcggtgacgacgaggattttgccggtcttttttcttggctgcggattcaaatttcgtatatttgcattttaataatatattttgatgtaccgatcggcacaggttcgaaacctaccgatatttcgacttttcttcgaactcccttgtgaggtgaggtgtggtggggccgtattgaaaaacggccgcagagttgtgaccgatcgccgaaatcggcaggaaagcggtcgtggtacagggatgaatagttgcctatcgaaattgaacgatgacggggatggaaaatacgatgatatgggattttgtctggcgcctggtactggctgcgctattcggaacgataatcggtctggaccgggagtaccgggagaaagaggcgggtttcagaacccattttctcgtttcgttggggagtgcgctcatgatgatcgtttcgcagtacggcttttcggagattttgacgcatgacggcgtgtcgctcgatccgagccgtatcgcggcgcaggtggtgagcggtatcggtttcatcggggccggtacgatcatcttcaaccaccagatcgtgcggggactgacgacggctgcgagtctgtgggctacggccggtatcggtttgaccgcaggcgccggaatgtcgtggctggctcttgccgcaacgatcctgacgctcgtcgcgctggaggggttgagtttggttttccgttcgctcggatcgcgccggatggtggtcgtattttcggcatcggaccggaccggtgtagcggacacgctggaccggatacggacggacggttatatggtcgtgtcgtacgaagtcgtgccgcaggtcgtgggcggcgatggaataacctaccgggttacgatggtggtcaaggccaaacccggcagtgacaacaatcaattgttggctctgttgcgggaaaacacggacataatagtagaaagaatcgcgtaataattttgtatatatatgggacgaaactctcgggggtttttaacgggtataacaacctggtggcgtaaaaagataatcgcggtgaggcattcgttttaccgcaaacggctggtgcggcgattgaccaatctcgccccgtcgatcctttcgctggattgtgtgggcggtgttatggcgcacgacctgcggctgcgtttcaattccccgacggtcaatctgtttttcgaatcctgcggggattttatcgactatgtggcggatttgcgctattattcgcaggcggaactgtgcgaatgtccctatgcgtacgagggggcgcgtcgctatcccgtcggcatgctgaaaggaaacggcacgctgcccgatataaagatccattttctgcattaccgctctttcgaagaggccagggaaaaatggctcgagcgcagcggtcgtcttgatttcgacaatctgtgcgtagtcatgcaggcggcggagctcgacgagggtcttttggaacgtttcgaacggctgccgatatcgcgcaaagtgatcctgggctacgaaacgctgccgttgcaaagcccgtcgattttcaagatgcgttcgctggattctttcgtgccgggccggatcttggattataacggtctgtcgggtcggcgttatctcgacgatttcgattacgtcgcatttctcaacgacggaaccattcgagcgcaaaattgcccccccccgcagaaattccgcgactgattccggggtatgattttgctggtaattctttcggtaaggaggctgtcgtaatgagtttttgtctgttctgaaacagcgcgaaaattcacggcttttccggagaacaggtcgaagaaatgcaattttccccatctgttctttttcagttgtttacttgctgcgcccgcttcatacgatgattcgatcgtctataatgaatgattcaaaatggggattggagtgaagaaccagtaccgattggttgctgaaatataacgacaaagaatctcttgcactggaaatgttcgcatctgttatttgttgctgcaacagacataataatcccggatcttcggtgacgggataaatctcttcgtacacatgggttctcccgttgcgggagaatgaaaacgatcccataatctgaatatttccattttcccagaacaatccgatttgattgatcgaataacagacctgttcgatggtttttcccttcagccgttccggactgaaatcatcaggaataagatacataacgattggtttaaggagaggaaagatcggcatttcagtccattttgcagggctgtttgttgcggtagcggtcggtcgttataagacggacgttttctgcttcagctattttacccatattgggccgtaacctcataattcttattctgtaatttttgggatgctggcttgcgtgcgatggcagtccggagaattcggttgtggagatcgacgtgtcggagatctcagtttttatcgggttttcgggttattgccaatatcgatatacgatcttcagaaatttttcccgggacatgtcttggggattcgtgcccgggaccccttccggtatcggttggtccattgctgcgaaatggtcgatccagaattgcggcaaccgaccgtcggccgtgcggaaattcatcggccgggctgtgaaaagatgttcgtttttggagccggtcagataacactcccaaaccagttcgctgcaatacattttgccgttatggggtagaaaggagtcgtcgtaaggttggcccagatactttttggcttcgccgatcgcccgggtcgccagctccctgcgttcgggaagagttatgcgggctatcgctgcagccggacggccttcgattgtagcggacgaatcgaggaatttttgcagcggagtcatcgtcaccccaggctcggattttgcttccagcacataaataccggccggttcgaccgtgatgattcctacatgggtgaacgaaagatcggactccccgcctgtcgcatcggcgatggcttccgtcattccgccggcgatcccgacctggaagatcaaatctcccgattccgggtgaaattcctgctgatagcaggaggtcagcaggaaaaatatacctataatatatataagcgttttcatcggaacattataagttaagggtgatcgcgcagtcaaaggcagtaaaaagagagggtgcagtcgtgcgggcatgcacgcaaagattgccgagtcacatcctatcttctgcaaagatagtgaaaagcgggggcgagccaaatttatttgagcatgcagccgtagcttgttcttccgaagatagcgaaagatggagtagagtgaggcaacttgccaacttgcatgtaaggattaccgaatctcctcccttctattgcttttcgagataagagtaattttcagggtatttatcgttggacagttatatatttttagctgtcacgactgttttgtcgttgattttggcggcaacttatagtttgggcaagctaaatctctttcggaagggaggatgtcgggcagcttcagggtgaagggcggtatgtcgagatataaatcaggtattgctgtggaggtattcggttaattttcgtttgtgtagtgagtttttgtggttgttgtccatatttttttgctgaatttggcggaataaccggtgtgcctgcgtacaaacgggaagaatgaatcgaaaattattgggagaaacaaccgaattttgtagctgccgtttgtgataatatttatattgaacggcaggaacaacagcattgggggtgagaaaagcaggaaaaactttgtcggtaatatttctgaaggagtgataaaaccagaatatttgtgcttatttattccttgaggagtgaaatgccggggattgttgtcgagggtttcgagcggatttgtctttcccgaccttgtgttcttattttgctcgagcgtgtgttttccatctattttcgggctggagggagtggaggcaggttttgcacctgaaaaagttttcgatgtaatatgttgatgtttagtcaagtgtgacgattcggcgaaaatagtgtgaaaaaagagtgaaaaatatttggataattagagcaaatgcccttatctttgcaaccgctttgagagagaaacacaactcacagcgacaagttctgaaaaagttttttttgaaattttcttctcgaaaaatttggaagtttgaaaaaagtgctttacctttgcactcactttccgactgaaaaatgagaggagagaaggagaggctcgaaagaggcgatccgatgaaaaacagaatcgttctaaatagaaatatatagaacaacgttctttgaagatattgagcagcaagtttttatccactctcatacgagagtgatttcaaacaatacctttgagattggagctaagatttaacaaaaacattttatacaatggagagtttgatcctggctcaggatgaacgctagcggcaggcttaacacatgcaagtcgaggggcagcattttgtgcctggaggttggcgtgggcatacgctttacagcacgtattcgtagtgggggggcggtttataaacgcagccaaatgccgagaataacggcgcccgaaaccgaaatcctgtaaaatgaaccggatattgttgctttgccgctgcagaagaaatgcaggccgtatagattgtaattccttcgaatgtgcgggagatttgtatgtcgcaggacggatctatgatcgagataggctcttcgtttgtgcggggttttcggaaattcaatgtagagcgatccgctattttaagtaatccggctcttcgggacggaagtgattcgtgatatggttcgggagcggaatgtcacttgggaaatacaggagcgataatcggcaaaacgggatgggacggagttcagatccgaatgcgatttttggagggttgaaatagtcccaaacgataaacaacgaagtttttgcgtatgcggcgaagggatcaggggtttcctctgtcgtagtatcgcactgtcctatcaatatctatagagtattgtattgccggcggaattcgtctgtactacacttttgcttcctgcggatggatttccctgactattcggcctccttggaggcggcgcttgggttaaggactgcgataccgatcgtgttgccggtagggatcgtgctccgggggaggggtgagtcaagaactggatgccggtctggaaacgtgtacccggtggaacggattacttccgttcgtttccgatgttatgctttaaggcccggagctgtgcttgcatgcggtgaggaccttggttcgcggatgaaatcgcgggtacgggatcccgaatgttctgtcgctgcggttggatcccatatttcagccgaagataatggttggagttatatgaggtccggatcgttttcgcagacagggacggattcgtcgtagaattgttggtgtcttcctgctgtgggaataacgggcggtttcctgggcgcttgattggtcggtgtcgtggtgaggaagtggagtgccgggagcatggtttcgcaagataataaccatgttagctcgatccggtgaagccggcttcatttgaattcggggttctctaaatccggcttgtcagtaggcgcaggggcgctgtatgcggagtgatttcggtccattgcgtcgatgcgggcaacaaccaggtttcgccctgccggacatcgattcgattgccttcgttgtcggtcaatgaaccactcccctgaagcagaactattgccacgaaagagtccgttgccgaccagtcgcagcgtgttcgtgcggtcagggtatatagcgacgtagtaaagtaaggcgtggtgacaagccggacttcctgattgttctccggagcgtacgttatgcggctgttttcggaagattcgaaatcgatcgcttcgcgtgccaattcggtatgcaactcccgggaattgcccgctgcatcccgccggtcgaaatcgtagatccggtaggtgatgtccgaactttgctggatctcgacgatgaaggacccctttccgatgctgtgcacccgtcctgccggcagataaaagacgtcgcccgatgcgattgcctggcgattcaaaacgtcggtcaatgtattgtcggcaacgcgacgttcgtactccgccggtgcgatcggacgggagaatccggtcagtaacgaagcgcccggttccgcttccagcacgtaccacatctcgcatttcccgcttttcccgtggcgctttcgtgccagttcgtcgtccgggtgtacctggatcgaaagatcttcccgggcatctatgaattttaccaacaagggaaattcctgcccgaaacgggcatagttggctttgcccagaagttctgcgccgaagcgtccgatcagctcggacagggtgcttccggcccacggcccttccgccaccaccgattccgaaccgggcatgccggaaagttcccagctttcgcctacacgggagagcccggatgcgagttccttgtaggggatgatgcgttcgccgccccagagggtctgcttcagaatcggatgaaatttgaggggacgcaatgcttcaggtcttaatttgttcctacaaatatactatttttcggcaagcaaaagctttctgcgacgagaaaatgagacgggaagccggtgtatttgcaaccgggttgcaaggaaaatgcactatatttgacaccaaagaagaataaaagcattatgaaaagtcaaacgaatggtcgcggctgcgccgcttgcgatgcaggtcctgaccatgaccatcattcgcaaagctattggagccccgttgcgtcggccgtgttgtttgcggcgggactcgtcatgcaatataccggtgtcgaatttttcgcatctcccgcagtacggttctgctggtacctcgcggcttattttccggtagggcttcctgtgctccgggaggcatggaacggtatgcggcagcgggatttctttacggaatatacgctgatgagcctcgctgccatcggtgctttctatatcggagagtatcccgagggggttgccgtgatgttgttctattcgatcggagaggcgttgcaggagcgtgccgtggagcgggcgcggcggaatattcgtgcgctcgtcgatatccggcccgaacaggcgaacgtcttggaggacgggaaaccggtggctatgcccgctgcgcaggtcgtgccgggccggacgatcgaggtgcttccggggggacgtgtccctctggacggcgttttgctgtccgaggcggccccgttcaatacggcggcgctgaccggagagagtacgccgcggacgatctgtaagggagatgaggtgttggcgggtatgatctcttcgcagcatccggttcgtatcgaagtgacgcgcccgtatggggagagcgccctttcgcggattctctccatggtcgaagaagctgcggcgcgcaaggctcccgccgaattgttcatccgccgtttcgcccggatttatactcccgtagtgacgggattggccgtgctgatcgtcgctttgcccggattgtggtcgctcctgcacggaggcttcgcctattcgttcgacgaatggttgtcccgggccctggtatttctggtggcctcttgtccttgtgcgctggttatcagtattccgctgggctatttcagcggtatcggcgttgcttcgaaggccggcgtgctctttaagggcggcagttatctggatgccattgcgcgggtcaataccgtggttttcgacaagaccggcacgctgaccgagggtttgttcgaagtccgggaggtgcatgttgctccgggcgtgaattccggggagctgctcggatgggtcgcttcggccgagcggaccagtacgcacccggtggcccgggcagtcgtgcagtatgccgagagggagggtgtcgctcttctcgcttcggagggcgcagctgaaatcgccggacacggcattcgggccgaattcgacgggaaacagttgttggtgggcaatacgcgtctgatggctcgcttcggcgtggaatatccgtcggaggtcgatgcgattcccgagacgatcgtcgtatgtgcgctcgacggccggtatgcgggctatctcgtgattgcggacaagcccaaggaggatgccgcgcgtgccgtggcggaattgaagtcgctcggaatcgaggatattcggattttgtcgggcgaccgggaggcgctggtggcgaatttgggccgcaggctgggcgtttccgaggcccggggggatctcctgcccgaaggtaagatggagatactcgaggcgctgcgcggagagcccggcaaagtcacggctttcgtcggcgacggattcaacgacgctccggctctcgcgacgagcgatgtcggggtggcgatgggggctttgggcagcgacgcagccatcgaaacggccgacgtggtgatccagtccgaccagccttcgcgtctgcctgcggcgatccgtatcggacgtcttacgcaccgcatcgtgcggcagaatatcctgctggcgatcggggtgaaggtcgtcgtgctgacgttgggcgcactcggcatcgcaaccatgtgggaagcggttttcgccgatgtaggcgtcactctgcttgcggttctgaatgccgtgagggcttccaatcgtcgtttttaatgcgtatcttgcacctatgaacgaaaacgaatacatttccagcctcaaggcccgcgatatccgtcctacggcgctgcgggtgttgattctgcgtacgatggccggattcgaccgggctttcagtctcgcggatctcgaagaggagcttgatacggtggataaatcgactcttttccgtacgctcactctttttctggcgcatcacttggtgcacggcatcgacgacggtaccggttcgctcaaatatgcgctttgcagcagcgattgcgattgtgaaatcgacgacctgcatacccatttctattgcacgcattgccggcgtaccttttgcctgcgaggggtggctgttccgcaggtgggtctgccggacggattttcggccgaaacgatcaattttgttatcaaggggatctgcgccgactgttcggggcggaactgacaggatggatcgaggcggcttgtctgaacgacgaaaccccgtccgccccggtcggaaacggtcgattaaaggtccgggaatttccggaggctcctttcccgcagcggatgtcagcaggtggcgagccagttgcggatcagcgccgggccgcaattcgaaatgcaggattcggggtggaattgcacgccgtgtatcggcagattccgatgataaaaggacatgatgtgtcccgcttcatcgtgcgaacttgcgatcagctcttcgggcatcgagtccggatcgacgacccacgaatggtagcgtcctacgatcaggggcggagcgattttctgcagcagcagatcgcccgcatcggttacggtcagcgtcgtcggatgtccgtgcagcggggccgacagttgtcgcagttcggctccgaacgcccgggcgagcgcctgatgtcccagacagatccccagcacggggattcgctgccgcacgatctgtccgatcgccgccataaggtcgccggcctcttccgggattccgggacccggggataggagtatcccgtcgtaatcgccgaatttttcgaagtcgatccggtcgttgagttgtatcgtaatattcaccggttcggacgattcccgaagcagttgtacggcgttgtggacgaacgagtcgtaattatcgattaccagtatctttttcacggctacaaaagtaaccttttttatacctttgcggaataaaaatcgtcagaatggaagctcagcttgtccgaaaagccgtgaatcgttgtgccgcgcagggaaaaccgtttcttttcggggtcgatttcgaattgcgggagggatttttcgtggagaatccgctcgtctgccggcagatcccgtttgcctgcggagagattaccaatgtgccggatagcttctccggggaggcggaaattacgccccgcctggagattctgcataccgatcgggaggcgtatcttcgccggttcgccgtcattcgccgggggttgcttcgcggggacagttttctgaccaacctgaccgagcggactccgatccgaacgaaccttactctcgaggagatcttccgccgcagctgtgcccgttacaaactgttgctgccggggcgtctggtctgtttctctcccgagtgtttcgtccgcattacggacggggtgatccgctcctacccgatgaaaggaacgatcgacgctgcgttgcccgatgccgaggcccggttgctggaggattacaaggagcgttgcgaacattacaccatcgtcgatctgattcgcaacgacctgaaccggattgccgatcgtgtgcgtgtcgagcgtttccgttacgtcgagaagatcgctaccctgcggggcgaaatcttgcagacgagctccgaaatcgccggcgacctgcggtcgggatggcggcaggaactgggcgacctgcttttcagcctgctgcctgccggctcgatttcgggggctccgaaacccgcgaccctgcggttgatccgcgatgccgagcagtgcccccggggatattatacgggggtattcggctatttcgacggtcgcgatctggacagcgcggtgatgatccgctatatcgaatgcgagaatgggcggttctatttccgcagcggcggcggcatcaccgtgcacagcgccccccagcaggagtacgacgaggtcgttaccaaaatttacctgccgattccctgattgcgatggatgagttgcttttcatagaaaccattcgggtcgaggacggaactttcgttcgtcccgaacttcatttgcagcgtatgcggcagacggtccgcgaagcgtacggcgtcgcctccggttttgatttggcggacggttcgattccgcttcagcatcggaagggaacggtgaagtgccggatcgtttacggccggtcgctgtcggagatttcgtttgcgccgtatgttccccgcgagattcgctccctgcggctggtcgctgcggacgacgaattggattaccatttgaaatatgcggatcgtagcgcccttgcccgtcttttgcaacgtcgggacgattgcgacgagatcctgatcgtgcgcgacggggcgattaccgataccagttacagcaacgtggcgtttttcgacggacggaaatacgttacgccggatactttcctgctcaacggcacgcggaggcagtacttgctcggtacgggagttttaaccgaatgccgcattacgccttccgacctgggcggtttcgagcgggtcgtgctcatcaatgccatgttgggaatcgaggacgacctcgccgttccgatcgaacggattcggggattataaccgaaggtaagtggcataatcgcagggttgcggaccctgcgttttttatcgatcaaatccggcctttggcgggattcagcggtatgtcagctttgtcgttcgtaataggcgatccggtcgcaacagactttttccgtgatgtcgcgcatgagttcgaggcgcgggatcaaggcgtcgatgtcggtcttggtaacgacgaaatccttgttgtagcgggcttgtacataggcatcctgtaacagattgaacaggcgccgctcctcctccgtatttcgagggaaaaccgataccagttgcagcgtgtgcgtcttgcagcgatccatcagaatttccagcgcatgatctttatagccgtaaaggatatataccagcggaatggtacgcaggtaattttccgcagcttgatgtagatggaaagaggccattttatatttctgcaacccggcatagtaacgtgctcctaacagaaaatcgctggcgaactggaatttttcgctgaaatagtcgcgggcgatttgcgcgatttccgcatagttcaattttcggcatcgcgccagtttgaactcctgcgaggagtagagcatgattccctgctttttgatttcatggtagaagtattgtcccagttcgaggtttttattcagccgggaaatactttcgttgatgaattgcggccgggtgtaaaattcgctttgtttgttttcgaaaaaccgttcggtgatgcgggcgtaaacgtcgtattccttcaggccgagccttcggcgcgtgacgatcaaaatgtcgtagtcgctcatgaaaaaggtcgtcaccccgtaatcccgccgacggtcgcaatcgacgtacatatcccgggcgtaactgccgtaaagaataatcattacgcaatcttttatttcgtttcggatgatctccacaagttgatgcagatcacgtcttttttccgcaggcaggaagttgatcgaacttttcatgcatacaaagttagcaagaaaattgaaacgcctaatttttacaatgaaattaaaatactatatttgtgcgtagtattttcgcgcgatgacgtttgttgtagtggggcggcgtgtgtcgtccgggaacaaataagcagtttggatgcaatgcggaaatacggtagttcggcgtagccgacagacataaaagggtacacaactcttatgcctaccgtaaaattgggaatttacagtaatcaggtgtagcagttgtctgtccttgttatgccctgctcgtttcgacgggaggggcaggcaagggcgcaggacaatcgactgattacgggctcccaatgccttcggtagtagattgacaccgcgccttcttttcattttatatgcgagaaggtgcaaaatccgatccataacattttatgtccggggcccaacaattcctgatatagattgatacatccaaagaagctgtaaatcagaaagtaagaattgctcctacggaataagtaatttttggttggtatgaaaaaaacggattattcttcctggagaagattggagcgcgtgattgaatcttctggattgacaatcaattcattcgccagatatgtcgggttgccgcgaggcgaaaatctttatcagatcaagcggggaaattatggagtaagccttggtgtggctaaaaagatccatgcgaaatttccgcagtatccgatttcctggttgatgcacggtgaagccgaatccgctgctacgccggaaggcgatgcttttgtcgttcggattcctgtatatcgggactcttccgtggcggagtttccgcccaaggaggttccagaacggtatctgcttctttctgccgaagaggctcggggggctcaaattgcattatgcacggacgatcaattcggaacggttttgcagcattggctcgtgttgctgcgggagccggacggagaagttataaacgggagagtttatttcgttatgacggagtgtttctatctgttttgttccgtctatcgtatcgagggggatcctgctcgtctgcggttgaaatctttgtttgcaactgcagacgacgacctggaggtccgatgcgaagagatttgtgtgatgtggccggtttgtggggctatttgcggattaaaatagattcgtagtatacgggtttccgaagaatagtgttgttttttgtcggaatagtcttatcataatgtaaataggaaggtgtttcagaagtgaatttatgctgaaaaaaattaaattcgctctttccgaagggattttgcataataagaaaacactgattgccgaacctggaaaagaataaggcgatcgctttattctcttatttgtcaatcgaatataaaaataaaaaaggatggattcgaaaaatccatccttttgaaagttgctttgtgcggataaagggacttccgcatgaatgtaagcccaatgtatatcaacgaattgcgacggctttggcttctgtccccacatcgcctaccgtcattttgcacggtcttgcgcccgcctgcccgtttcgcctgcgcggccgccgtatctccttgcatgacattatattattctaattgaattatgcggtttggataatatcttccggttaatgcccgattactgacgatgtgaatgcagagtatggatatttgtttgtatagttcggttttcgtatctttgttttgctttaattttaaattgtttttattatgaaactgaggttgtgtttttttatgcttgcattagggatatgcggagcagtcgtgcaaggttgtgatgacaatgatgataacttggatgttcttgataaattgcaggctgcattttctcagaaatatccggaagccagtccgaaatggaaaacccggagtaattattacattgcggatttccagaaccagaattatgcagccgaggcctggtttacttccgatgccgtttggctgatgaccgaaacggatcttcctcatgcgtctttgcctgaggctgttaaaaatgcgttcaagaacagcgaatatggacagtggagcctggatgatgtggatatgttggtgcgagaaggcatggagccggtctatgttttggaggtagagcagggcccgcgggagatggatctttattacaacgcggagggaattctgatcaaggtggtggaagattccgaggatgattccgaggattatctgccgattgaacttcccgaagaggtgaaaaattttctgcaggagaaatatgcggcatccaaaattgttgaaacggatcaggagcacgggcagtttgaggtggatattattcatgacggagttgccaaggaggtgctttttgacaacagcgggaattggctttcctcatcttgggagatcagtctggatactcttccggaagtcgttaaaactgcgatccggcaggaaattaacgataagtatgtcggttatgaaaccgacgatgagccggaactggtagaaacgccggacgggaattattatcgaatcgagctggaagcggaagatgacagggaggtgattctcaaaatccgggaagacggatctttactgcagtagattcgtttgaataggcataccgacaggcagattttcatctgcctgtcggtatgttcgtattatatcatttgttttaatagaacgatttacctatgaaaaaaatcggtttgctgctatttttgcggtattcacttgctctttgtccgcacaaaataggctttccgtctttatcggaaattccaatcggtatgcttcggtcgatttgtcggatttccgtcggcgcctctgtgtggaatacgatatttcggcagaatcgctcaatgattattaccggcgttgcggcagagattgggggcatgtgggccttgcactggagatcgcctgaacctcgggacgaagcatgcgcgatgtctgtgaccattacaaacgttataaatgtgagggctgggggcggattctgatcgaactgagaatcggtcccgagtcgtcgtatcgtgttccgttctatgatcgggtgcattgttatagcgattactggcacgagcattacgactcctattgcaaacggcatgggaagtatctccgcacaagcacgggtataagaaacacccgaaatacgggaagcggaaatacgggagatatcatgacgacgacgatgacgattgagtgaccggtaataattccatataaatcattatacgtataattgttttatgaaaaagattttattggttcttgtttgcagtttgtttgctttcgagacggtttcggctcaagggaaaaacgccgtgggattacggttgggagatggcgtggaatttctttatcaatgcgatctttcgtctcggaattttttgcaattcacgctggcgactcctcattttgaagggctgtccgttacgggaatctataattggcgctgctgccggtggaattggacaccccagacttgcgattggtatctgaatgtcggtgtgggtggagccttgggactttatgactttgacgattcgggttttttgctcggtgtggccggctcctgcgctttcggctgtcatttcaaaaatgccccgatctctttggaggtagattaccgtcctgtgatcggagctgtgatcggcggtggacatgacggcttctttgatcccggattctggaatttcggattgtccgtcaaattccatttttgaaactatgaatgatcgttatatattcttaatagccgtttaagtaggaacggctattcgataaatctctgaacacgaactgtattgaaaaacaaataaaaaggtagaaaaaacgagagatttatttttggtactgatatacatatctacactggaaaatcttagaaaggttagttcgaaaatcttatgattctaacctcttgtaaattacgtcaaaatggtatttctgttaagttctgaaagtcttgtccatttctggaaattgaagttattttcccattctttccctttttccgtttggtggcaatacaggagaatcacaaatgtcatttgatttatttaaataatggattatacctatttatacaaacatagctatcagagaattgatgaaattcaaaatttgctaccatatgatatcttcatatccagctatgtaaattcacagagagtgcaggagcctgcagataacattcaagcaggtcaaaaaatatggtttgcaacagaagaagaaggtcgggatctatatctatctggaaaagatgttacgtttgtcaaagcgaatgaagattatgctccaattacagaaaaattagacacattacaattatctggcaagtctgtttgtgtggatgcaactggttgcaggggcccgtatttgatgtttctaatgcggtgcatgtctatgtataagattaataagtttgatatattatatactgaacccacacaatatagatgtgcttaaaacactcaattctctgacttttttacgaagtaaaacagatgcatggaaggtctggtatccatacgtcaaaggacgacaatgatttgcttattatagcagcaggatatgatcatagtcgtattgtagagtggcaaccaaaaagaaaggatgcaagaaaaaaagtgttgttatttggttttccagccattagtcctggtatgtttcaggaaaatatcttaagagcgcatgaggctgaagcggctatagaaacggagtgctttaaagatatggactcgaatatatatgcaccagcatatgatccatttgttacagcgcaggctataagtgagtacgttgaaaagcagaacaagcgagcacccattacaaatatctacctgtccccattatctacgaaacctcatgctcttggtatggcttgtattttttatgggaacatggatttaataaaaacattagtctgatttatccgtattgtcaacaatatataactgataattccgatggaattgctcgtatctggcgatatgaaattcaactaccttaagtaagagaaagctaaactattaatatcgtaacacgaagtaataaaaatatatttaaagtttattgtgggattataggataacccaattatatattatagtatgtttgcagtaaagaagacaatacaaatatggcaaagattacggtacgggacacaaatgttacagttatattgctcaatgagaacgactatatctgtctgacggacatcgcgcgatacaagagcgacgactcgaatgcggtgatcggcaattagttgcgcaatcggaatacgatcgaatatctcggaatttgggaaagcctgtataatccggatttcaaacccctcgaattcgaggggtttagaaaggaggccggactgaatgcctttaccctgtcgccgcaaaagtggatcaatacgaccaatgccatcggtatcatttccaaatcggggcgttacggaggaacctatgctcataaggatattgcgttcaaatttgcgagctggatttccgtagaattcgagttgtatatcgtcaaagagttccagcggctgaaagaagaggaacagaaacaactcggctggagtgccaaacgcgaactgtccaaaatcaactaccgcatccataccgacgcgatcaaacaaaacctgattccggccgaagtgaccgcgaaacaagcgagcatcatctatgccaacgaagccgacgtgttgaatggggccatgttcggcatgactgcaaagacgtggcgcgagcagaatcccgacttgaaaggtaatatccgggattatgcaaccatcaacgaactgatctgtctgtccaatatggaaaacctcaatgccgtattcatcgaccagaaaatgcctcagggcgaacggctcgtaaaactcaaccggatcgctattcagcagatgcaggtattggagagcaatgacgaacggaaactactgaaatagcgcaatggatctccgtaagatcaacagttatatgattctgctggcgatagtcgttgtcgtcggcttgttcgtgtccacggtcgcgcgactggtgatattggcaaaaggggtggatgcaggtacggcgaatcttgtttttctgattatgctgggtacctgtgcgatagcctatctgaccattttggcagcattttccagcattgcggatttcattgccgataaaattctcccgaagatagcccgaaagaaggctcttactgctgaagcgaccaggattccaccgatcgatgatatacccgattcggatgtcgagcaaatcaagcaggaggcagacaaacgatttctcgaacggcagaaagaacagatcgaactgttccgacgttatgggcatagagaggtaggtccctacatcacttccgatgaacttgtgcgtctcgatcgctacatcgaatattatgcatgcaggaatccggctcgacagaacttactcctattcgtccgcaaaagttgaaaaatgccgatctattccatttcggatggaacatggcacactatttcggacgaccgaaacaggaggtagtgccgtggctgaaatccgcatttgctccgcttgccgagttggaggattcctatatcaaagggaaactatattcaccacagacacgtcaattcaccatccccaacattcccggctatatggccgaacacggcggctgattttcccttcaaaaagatatttcagggagattttaaggagatagcgagtgtttttgatctccgaaaaatctccctttttatttgccccggttccgattggacggaacgaacgaatccaagtttaatctaaaaatttcgattatgagtttaagggatttattggagtcgggggcaaacgtcagcgtgacggtgacgctcgacgatttgagagcgattttcaacgaagcggcaaaaggcggaagaatttttggagcgcttaggaatagagatcaaagaccgcgaacagggccggggaatgcggacgagatagagtaaaatctatttctgcgtatagcttatatgggcaataccccgaatgagtggttgttcgtctgcgaattattttctatttttgtaacgtcgagcgtagtaatgcgttcggcagacatactgaaagtgttttcgcactgtctttacaacgaaatctgacagtttcaaaaagagaaaagacaacgaatgacactcatttcttgtttagattatggcaagggatacgttcagtgttcccataccccatatctactcaagtgtggggtattgcatcgtttattttctcttgggttttgtcagaacctcgttgtagataagcgaaatcagctccacactttctttttgattattcaccattgaggggccggatggtaattacaatttgaatattcaatcaattcaaataataattactatgaaaaaaattctatcggtgttgtatattgctacattgctgtttgcaagttgtagcgatgagtatgacgattcggcattgaccgggcgcgtagataatttggaaaatcgggtggccaaattggaagagctctgcaaacagatgaacaccaacatttcatcgttacaaactattgtaacggcattacaaaagaacgactatgttacgaacgtgacccccatcatgcagaatgggaaagaggttggctatacgataacgttcagtaaaagtaatccgatcaccatttatcatggtaaggatggacaaaacggaactgacggagaggatgggaaacccggagttgacggtgaagacggaaagaacggacatactcccgttatcggagtaaagcaagatactgacgggagctattattggacactcgacggtgactggctgacggacgatagcggcaataaaatcaaagcagagggaaccgatggcaaggatggtacggacgggtcgaatggagaagacgggaatgatgggcaggacggaaagcccggcatggacggcaaagatggtattacccctaaattcaaaatcgaaaacgattattggtacatttcctatgacaacgagtccacgtggacacaactcggtaaagccaccggtgaagacggtaaagatggagaggacggtattagcggtgatccgatgtttacggatattgactatgaaaccaataccgactatgtaatttttacgttgtctaacggtacgcagatcaaattgcccacgtggtcggcattcgaggctctgaaaacactctgtaatcagatgaataccaacatttcgtctttacaaacgattgttactgctctgcaaaataatgattatattacagagattacccctgttatgcaagatgggatagaaataggctatacgatcagattcaataaaagtaatccaattactatttatcatggtaaagatggccaaaacgggacagatggttcggatggcaagcccggggctgacggacaagacgggcatactcctgttatcagcgtaaagcaggatactgacggcgtttattactggacgcttgacggcaagtggctgacggatgatagtggtaataaaatcaaagccgaggggacagacggaaaagatggtgcagacggttcagatggagaagatggaacggacggagcgaacggtaaagacggcattactcccaaactcgaaatcagagagggatattggtacatttcctatgacaatggaacaaactggacacagttgggcaaagccacaggtgaagatgggactgacggaactgatgccgtttcgattttcaaggaaattacccaagatgaagattatatccatttcaaattgcaggatgattcggttatttccgtgcccaaacatcatccgctgtctatcacattctccgaaaccgaggatattcgggtattggcggataaaacatactcgatcggttataccattacaggagctgatgaaaataccgttatcaaggctttggcacaagacgggtttcgggctgtggtaaaaaagacggacaatgcaactggaaccatcgaaatcactactccgagtacgattctgccgagcgaggtgctgatattcgtcaccgacggtaaggaacggacgattatgcgttcgatcaactttgtcgaaggagttatcgttgtaacgaccaaatcctatacggtcggttacaatggcggtacggttactgtcgatctctcgaccaatatcgactatacggtcgaaatacccgaagccgataaatcgtggatttccgtagctgatacacgtacccgtgccgctatgcgtgatgaaaccctgacatttaccgtagcctccaattcggctcttacagttcgttattcgacaatccggttggtcgataacctcggtataacatcagaaacgattcttatcacccaaaaatctggaacctcacaaaccgttcatgttacaacggccggaaccctcgatcaacttatcaattctgaggataaggacatcatcgaggaattgacccttactggcaagatcaacacattcgacttcgactttatcagaacgatgaaaaatcttaaagcccttgatctttcaaagaccgacaatacgactattccggcaagttgcttagctaatactaatatttcgacagttttattgcctcttggtcttactgcgattccaaatcgtgcattttatcaagcagcaatcacttcgatatacattcccgaaacagtgcagactatcggagaatatgcattttatcagtgtaaatctattacagggaaccttgtaattcctgatgccactacctcaattggcaactactgtttcacatcatgtacttttaacggcaccttgacactcggcaatggattacaaactattggtgagtctgcttttggagggaaccaatcattggtaggggatctaacaatacctgtaacagttacgtcattaggcgcttctgcatttagtgggaatgtaggcttcaatagacatctcacgattgatagtggtataaatataccgtttgcctgtttttatgattgccgtaatttttctaaactcactatagctgaaggggttaatattattggcgagtctgcctttgaaaatctttcaagcattacaggtaatcttaagttgcctaattccataacatcaattggggctcgtgcatttttcggttgctctaaaattgatgggtatttatctcttggtccaaacattacatcaattggagattgtgcatttgtaaaaagcattgattctgaagaaataatacaagaaaaagaaaagctctccaccgatcccgatatggactactatgatcgtattatatacgacgatacttattattctgctattttttccaaaatatatatccaatcttcactaccgccgacgattactattaaatcatttgggctgaaagaaacgacgatttcagataagagatttattaaaagagaaatcgtcgaaagacaaccgggatggagcaggaaaagacagtatgacatctataatgcttacagatatagaggctcgtatccaaatcatttgattgttccaaccggatgtacagcaaattattctgattgggaagttgatttaattgaagaagttgatttttagctttttaacatcaataattatgtgtacaaattccaacactcaaccatcgaatggacagcaactgtcacccgatgcatttattgagaactcccaaaacgatactcaaaagatgaatacatttacagcttatgaaaaagcaattgaaggctatcagtttcaggtaggccgctacaacatctggatgaactattatgccatcttcgtcggcgctttattcgtcgctctttactcgatctggccgaaaagcgaaatcgaaacgctatgttgcgcatgcaaaccggtttgcggcaaagctcctgcggcagttgcagaatcgcaggagtggttcttgcccctgattatatccgttctcggttggatcgcctccctttgttggtacggagccttgctcgggtaccgtaagtggaacgagcactggattaaagtggtacagggtatagaaatggtacttaataaagatgtatatcctaatgtttacactgcccaaccggaacgtcctcagaaagagagtttgtggaaacgtattaagaatatttttcgatgcaataaatcaaaatgttatgcgccaggctttgtctctactcagaaaattaccggaatttttatttttttcgcagcattggcttggggcggtttgataacctacattttatatcaatggtgctgcggatggaacctttggagcattatccttagtgtcctgtgtggctttcttactgttgtattgctgtgtcgtttacattggggaaaatcaagattttattcgtcaactattattgatagatagctaccggcgatgaatcgttgaaaagaaactatatttacttacgaatcattgcaagctacgaatattattttagtggaacaatcccatttgacgtaaaaaacggaggctcatcggcctccgttttgtttaaaatccaatattcaataaacaaaaattttcaactttacaaaaaaatgcggacaaaatgcggacatatcagccaaaataaaaacctcaaatgattgtttataagtcatttgaggttttttgaatagtacccggagccgggatcgaaccggcacaacattgctgtcattggtgtttgagaccaacgcgtctaccaattccgccatccgggctgctaaatcggtgatttgctctgcaaaagtaatgatttatcgaggaactccaaatttttttcgcatttttctgcgtccttactgtctgccgaagtggacgaggagcctggcggccttggccggtccgacgagggccgagagttcttcggcaggggccgtgcggattttctccaccgtacggaaatggcgcaacaggagctctatggtcttcgggccgactccttcgatattttccagttcactgtgaatgaaagctttgcttcgcttctgccggtggaaggtgatgccgaagcgatgggcttcgtcgcggatgtgacacaccactttgagcggttcacccgtacggctcaagtagtagggcatcgggtccccggggaagaagatctcttcgatccgcttggccaggcctacgatggggacttgtttttcgattcccagttcgcacagcacggcataggcgctggagagctgtcctttgccgccgtccacgataatcaggtcgggcagttcggctccttcggcgatcaggcggctgtaacggcggaagacgatctcgcgcatcgaggcgaagtcgtctgcaccgatgacggttttgatgttgaaatggcggtactccttgcgtgaaggcttgccgtcccggaataccacgcatgaagctaccgggttggtcccctgcaggttggagttgtcgaagcattcgatgtggcggggcggacggtccaggtgcagctccttttgcatggtggccatcaggcgttcggtatgccgctcgggattcttgatctcgaggttcttgagttgttcggcgcgatagatacgggcgctcttgagcgagaactccagcagatcgagtttttcgccccgtttgggaacggtgaaggtcactccgtcgaaaagttgcgcggccgaggggaggtagggaacgatgacctctttggccagcgttccggcgatcgtttcggcgatgtgctggatggccagggtcagcatttgggccggatcggtgtcgatgcccgtggtgagccgtatcgtatagacgcccacgaccgaaccgtggcggatgcgcaggaaattgcagtaggccacatcgtcgtccaccagcagggagaagacgtccacgtccacgatgcgtgcgctgacgatcaccgatttgctcgaatagttgtccagggcgtcgaggcgtgtcttgtagcgttgtgcgacttcgaatttcaggtttcgggcggctgcctccatctctttttcaagataggtacgcacggggcgcaggtcgcctttgagaatcgaaaccgtcatatcgaccagtgcgtcgtattcttcttcgctttgcgctcccacgcaaggtcccttgcagttgcccaggtggtattgcaggcagaccgaatagcgccctttggcgatagccgccggcgaaaggttgagcgagcaggttcgcaggggaatcacctcgcggataaactccaggatactgcgctgcatcattaccgagccgtagggaccgaaatattgggagccgttgcggttgaggatgcgggtggactgtacgcgcgggaacggttcgcggcgcacgacgatccagggataggtcttgtcgtccttgagcaggatgttgtagcgcggctggagggtcttgatcaacgagttttcgagcagcagggcgtccgtttcggtatcgacgacgatgtgccggatcgcagcgatctgcctcacgagtacctgtaccttggcgctgtgttccttgttctgcatgaaatacgagctgacccgcttgcgcaggcttttggctttgccgacgtagatgatcgtcccgttcttgtccagaaactgatatacgcccggtgacagaggcagcagggccacctgttctttcaacccgtatttttttacgttgtccatctgtcgcaaaagtagcaaaattttaacaaagacctctgccgtgcgctgaatcggagaatgagccggagtttttcggcagaagtcgtcgattgaacagattgttcgtggttgaaaagtatttatattttgattatttgtcgaaaacattatacctttgggccgttttattgagcaaaatctgcctatgaaaaattttttattcctgttatgtattctttcgctctgcttcgggtgcgacaaggcgtatgatctgaacaagatcgaatccggcgatgtaaccatcggcaacgaccagagcgaatggattatgccgttggcgcagatcacggtcggaatggacgagttgcaggacggcagtgcggatatccgcgctattttcgacgaggtcgatatctggttgccgacgacgctcccgggcaatgcggagtgggtcgatatcgtccgtctttcgagcgatggaacttatctggacggaatgctggaggctcttatcgacgagatgctcgttcccggatcgaaaaaaatggacgaagtggtcgatctgatttggtccaacgaaggttaccgcgagcgttttacggcgttgattccggccgatagcgaggagcttttcaaggcggaattcaagaagtttttcggcgaggacaacgaggctggcgaagcgttgcgcgatacgatgggcgagctggcgcgggaatttctttcccagattaaaatcaatacgattacttataatgcgacgttggatgtcgacgatgatttgatcgatatgcttgccgacaacctcgatcccgagggtaccgtcgatccggtcaatacgctcgatctgtacggcgaggtgcggagcagtctgccggtgagcttcgaagtagctgcggatttttccgaaacgaacgtggctatcgcgcctttcctggtcgaacccgacgaagagaatgacatcgctcccgtgcggctttacaaggatgatatccggagtttgttctctttcttcgaactgaatgtcgattttatgccgcagaaatattatccgcgcatcggattcagcgacagccagtcgattcgtatgatgctgcatttgaagaaacgcggcggtcttaatctgaacctttaatccggattcctcatatgaaaaagatcatatatactttgattgcggcatttgtcgcatgtacggccgtggcacagacgccgagtgcctactttatggagggttcgactttccgcagccagcttaacccggctttcgctccgctgcgcggctatgtgaatattcccgtattgggcggtgtgcaggtcaacgtttccggtaacctctccgtcagcgatattttttatccggtgaacggaagtttggtaacgctgttcgacaagaatgtttctgcggccgaggcgttgggaaatctgcgctcgaaaaatatgctcggaaccgatgcccggatcaatatcgtcggtttcggtgcattccgcaaggatcataagacattctggtcgttcgatctgaatatgcgtgtggaggcggaggccaatatgccctattcgttgttcgactttctcaagaacggacggaacgaggccgttatcaacgatatcaaagcctcgacacaggcttatctcgaggccgctttcagttactcttttccgctgacggatcagatttatctcggtgctcggggtaagtttctcgtcggcgcgggccgtgcgcggacgtcgatcgaccggctcgatataaaattgcaggagaatagttggaatatcgacgcggacggttcgttcgaaatgtcgggccttgagatgagctccatgcagcgtcccgacgggtcggaatattattcgttcaacgatttcgacgtctcttcctacaaagggcctgcgggttacggttttgccgtcgatctgggtgtgacgtacgacgtgattcccgatttgcagctctctttcgccgtgaacgacctgggtttcatttcgtggggaaagaaatacctggagcgtgggcagatgaccaaatcccaatcttttaccggcgtggagatcatcgacggtgaggttcacgatccggagttcgatttcggcgagctggagttcgaccgggtgcaggcttccaaaggcaagaccgagatgctgcgcacctcgatcaatctgggggccgagtacgaggtttggcgtcacaagatcggcctgggtctgctttacaacgtacgtgtctgggatgtgaagacgttccacaacctgaccgcctcggtgaacttccacccgattccctggtttacgctgactaccagttattcgtttctcaacggccaggggcacgccctcggtgtggcgatcaatgcctgccccagttggatcaacttcttcctggcgaccgatatgttgatttgcagccatacgccgcagttcctgcccgtcacttcgacttcgatgaacgtgacgctcggcatcggcgttccgatcgggcggcgcagccaccgcattccgggagagtatctctaccgataataatattgtatgatattagttaagaagcctgcatcggtagatgcaggcttctttgatgcggtgttttctctttttacgattctttgccgtaaccggtgtttgccggttttcgatggcggaatcccgaaggggtacgtcttcgggccggagaacacgtgggaacggtaggatttgattatgggaccaaagtcggcactcgttttaccgtccgcagcaaaggtgatcgaccggaacgtcgaacggatcggcgggcagctcctccacgacttgatgcggatagcacacgcctgccttgaaagcccggaaacccggctgcgacaggtatttgtcgtagaatcccttgccgcgtcccaggcgcatgcctgcggcggtgaacgccacacccggcacgatgataaaatcgatctcctcggggcggcacagcgcagtggcctccggttccgaaatgccgaacgagccggaatcgttcatcgaggcgggatcgtaatcgtagaatcgcattatgtcgccttccacgcggggcagcacgatccgtttggagcggctccagcgttcgagtgccggggcggtgaggggttcgtctttgagcgaagcgaaaagggccaccactttggcgcgtgcgaaggccggaagcctctccgcttcgttgaaaatacgtgcggaaagctcttcgcgctgttccgaagaaagggccgtattgagccctttcatctgtttccggatttccgttttggtcataaaatgcctgattttaagcgtaaatttcgaattgttttgtgttgttattatgcaaacaatgactatctttgccgaagcgcaaacaaatttttaacaaaaataaacaaatttcaaacattatgggctgttttctaactaattcttctcttggcaagaagttggtaatgagcattaccggttgtttcctcgtgctctttatcctcttccacatgtcgatgaacatcgtggcgatcttctcgcccgaggcgtacaacacggtctgcgcattcctgggtgccaactggtatgcgttggtcggaacgctggtgctggtcgccggtatcctgatccacttcatttatgcgctggtgctgaccgtgaacaactacaaggcgcgcggttcgcagcgttatgccgttaccgtgaaggaaaagggtgtgcagtgggcatcgaaaaacatgcttgcgctgggatggatcatcctcggcggtctgttgctccatctgttcaacttctggtcgaagatgcagctggtcgaggtgctgggacaccatgaaaattcgctcggcttctcgccgcaggacggcgctgcgctgattcagtacaccttctcgcagtggtactacgtggtgatctacctggtttggttcttcgccctctggttccaccttacgcacggcgtgtggtcgatgttccagtcggtgggctggggcaacgacatctggtatccgcgcctgaaatgtatcgccaacatcgtggcgaccgtcgtgttcctcggtttcgctgtggtcgtgctggtctatttcttccggagtctttgctgcggttgtgtctgctaacatcttacgttgaattataaaaatatagagatatggctttcaaattagattcaaaaatacccgccggggaactcgcgcaaaagtggagcaaccacaaggcggcgatcaaggtagtaagccctgccaacaaacgcaaactggatattatcgtcgtaggtacgggcctgggcggtgcctccgcagccgcttcgctcggcgaactgggatacaacgtgaaggttttctgcatccaggactctccgcgccgtgcgcattcgatcgcggcgcagggcggtatcaatgcggccaagaactaccgcaacgacaacgattcgatctaccggctgttctacgatacgatcaaaggcggcgactaccgcgcccgtgaagccaatgtttaccgcatggccgaagtttcgaactgcatcatcgaccagtgcgtcggccagggcgttccgttcgcacgcgagtacggcggtatgctggacaaccgttcgttcggcggtgcgcaggtttcgcgtacgttctatgcccgcggccaaaccggccagcagttgctgctgggagcttatgccgcactcaacaaggagatcgctgccggttcggtgaagagttatccccgtcacgagatgctcgacatcgtgatcgaagacggcgaggcgagaggtatcatcgcacgcaatctggtgacgggcgaattggagcgtttcggcgcacacgccgtagtgatcgcttcgggcggttacggcaacgtgttcttcctttcgaccaacgcgatggcttcgaacggttcggccgctttccagtgctaccgcaagggtgccggcttcgcgaatccctgtttcacgcagatccacccgacctgtattccggtgcacggggatcagcagtcgaagctgaccctaatgtcggagtcgctgcgtaacgacggccgtatctgggttcccaaaaagatcgaggatgtgaaagccctccgttcgggtgccaagaaaccttcggatattgccgaagaggaccgtgactactacctggagcgccgttatccggccttcggtaacctcgtgccgcgcgacgtggcgtcgcgtgccgccaaagagcgttgtgacgcgggcttcggcgtgaacgaaacggggttggccgtgttcctcgatttcaagaccgcgatcgagcgtctgggcaaggatgtcatcaaacaacgttacggcaacctgttcgacatgtacgaggagatcaccgacgtaaatccctacgaacagccgatgcagatcttccctgccgtacactatacgatgggcggtatctgggtcgattacaacctgatgactacgatcccgggtctctacgccatcggtgaggccaacttctcggatcacggtgccaaccgcctgggtgcttcggcgctgatgcagggtctggcggacggttatttcgtgctgccttatacgatcggcgactacctgtcgcacaagatccaggctccgaaggtgaagaccgataccaaggccttcgacgaggcagagaagggtgtgaaggataagatttcgaagttgctttccatcaacggcaagcagtcggtggacgatattcacaagaagctgggacacatcatgtgggagaacgtcggcatggcgcgttcgaaggagtcgctcgagaaggcgatcgtcgagatccaggcgctgcgcaaggagttctggaaggatgtgaaggtcgtaggcaaggcgaacgagttcaacgtcgagttggagaaggcgctgcgtctggccgatttcctggagctgggcgagctgatggcacgcgacgcgctgaaccgcgaggagtcgtgcggcggacatttccgcgtcgagcatcagaccgaagagggcgaggccaaacgcgacgacgagcacttcgtatatgccgccgtgtgggagtacaagggcgagaacgaagcgccggagctcacgaaggagccgctgaacttcgagttcgtacaccccgcacagcgtaactacaaggactaattcttctgtcgtctaactttaatacacaatttgaaactatgaatttcacgttaaagatatggcgccagaaagacgccaaggcaaaaggggcatttgaaacctacaaagtcgagaacatctccgccgacacctcgtttctcgagatgctggatattctgaacaacaacctgatccacgagggcaaggagcccgtggcgttcgaccacgactgccgcgagggtatctgcggtatgtgctcgctgcacatcgacggccgtgcgcacggcccgggcgacggcgccacgacctgccagatttacatgcgccgtttcaaagacggggcgacgatcgtcatcgagccctggcgttcggcggctttccccgtaatcaaggacctcgtggtggatcgcagtgcctacgataagattcttcaggccggcggcttcatctcggtccgtacgaatgccgtgcaggatgccaacaacattcccatcccgaaggccgatgccgacgttgcgatggatgccgctgcctgcatcggttgcggtgcctgcgctgcgacctgtaagaacggctcggcgatgcttttcgtcgccgcccgtgtgtcgtcgctcgcgaaactgccgcagggacgtgtcgagggtgcccgccgcgccaaggcgatggtggccaagatggacgaactgggcttcggtaactgtaccaatacgggagcttgccaggccgagtgtccgaagatgatttcgatttcgcacatcgcccgtctgaaccgggagttcctctcggcgaagttcgaggactaatcgtttgaagaatagatgcaaacaagcccggagcgaaactccgggcttgtttgcgtatggcgggatccgaaactcgccgaaattgcggggctgcggctgatttacgctgttcgcctttccggtcgttgcagcaaggaggcccgccgggagattgccggctggcgattcggccggattcgaggtcggggttgaaaatatggggcataacgacctttatgccccattccgaaccggtcgttgtcgccgccggagccgagaatctgttttccttcctacttttttatgtagctcttcaacgcttcgacgtactcctcgaaagcatccacgcctgtcggggtaatgcggcagagcgtgcggggcatttttccccgaaaggtcttttcgaccgtgatgtagccggctttttgcagtttgtcgatctgtacgctcaggttgcccgccgaagctcccgtctgttcccggatgaaaacgaagtcggcctcttcgaccccgaggaggatcgacattaccgccaggcgcagttccgagtgcagcaggggattcagttccttgaacatcttttgtgcgattggtagttgatgatatgtcccgggacgaccatcatgatgaaaaatacgccggcaaagataaggatttcgttgttcaggagtccggcggttatctcaattccgtcagaagttgcgatttttttcaggaaatagtcgtataaagggaagaggactgaaagagccatacaggtaagtcctgtgacgatgtatattttcgaacgaacgatcattccggttgttgccgttgccgtagccatcaccagtgtaatgagttcgaaaagactgtgtcggtaggagagtccgtgaaatagcgaaaagaggaagatcggaatcaatgataatgaggatactaaccagaccttgccgacgatgcggtcgatctccgtgcggggctccgtcggcttcttgtccgggaacaaccgcatcagcagacagccgatgatgggaatgagaaaccaggtgaagcaccaggcgggatggcatccggcgatgttgaaccagtaattgagcagggcgatcccgacggtcgtatagccccatacgaggaacgggcgtcccgcatggttttccagccggttgcgggtgttttgaatcatgcgcgagatgagttccatactctctcgtgcgtctaattttctctcttccatacgcagtgagttttgatgattatatattttagcatgccgcttttttctttgcagattcgggtatccgttcgttggcagccgtttttgactgtgtttacaaggcatccctcgccccgaatgatttcgggctgttgtccgaccgtatcggaaatcgagttttttcgtgcggtccgaccgtcggcggatcactccgcatcgtcatcgtccgagagttttgtcaggtggaatatcagatccagaataagaccgagcccccagcctgccatgacccacagcacccaccaatagtggggcgtcgtgagggcattgactccggccagaaatgcacaaattactgcgtatgttatccattcccggatgagccggcgctttctgcgtgcggctttcgcatcgatttttcgagttgtttccatagctttcggtttttgttggtattacaaatataaactactttattttataaaccaaataaaatgcctgaaaaattgaaattttacgatgattcggggcagggggcgttgaggatgaaatgtacggggtaggccgaaaggctttaccgagatctgttaaattatggtattatatgcgaccgtttttttgaattcggcggtagccgcaattttgcgggccgttattcgatgccgggttcaccctgaacttttttcttgggagggcgcgagaaacgtccgagcattgtcggtcagattcggatcggagggcagtatattgattgagatatatctttcgtggccctttattcgacggttgcagcgtcgaatccgaagggacgtttattcgcgggcttgtggccgcgtttataattcgccccttgcctgcatccttttcccggaggggatttggggtgctgtgctttcgaagaggtacattaaagtatataatcgcgccgcatactttatccgagcaggatcaggctgagggccatgatcgccatgccgctcatcacgccgtagatcgagatgtgggcttcgccgtattcgcgggcggccggcagcagttcgtcgattgagatgaaaaccatgattccggcgacgcctgccaggatgcagcccatcatgacgggagacatgaacggcatgaggataaaataggcgagcagggcgccgaccggctctgccaaacccgataggagcgaatagcggaaggctttcatccggtcgccggtggcgtaaaagacggggatcgaaaccgcgataccttcgggtatgttgtgtatggcaatggcgacggcgatggcgatacccagcgtgggattttcgacggcggtggcgaaggtggcgatgccttccgggaagttgtggatgccgatagccagggcggtcatcagtcccatgcgcatcagtttggcatttttcggtttcttctccagctcttcgatcatatgggcttcgtgcgggttctcgaccgaaggcaccaaccggtcgatgacgccgatcagcagtacgccgccgaaaaaggccagggtcgtaatacccatcccggtttggggtccgtagatggctccgatagcctcccgtgcctgttggaacagttcgacgaacgaaacgtagatcatcacgccgcccgacagtcccaacgagaacgaaagcagtcgcttgttggtacggtgagcgaaaagggctattgtgctgccgataccggttgccaggccggcgccaagggtgagcatcaggggtacaaaaagagtgtgagccatctcgaatactgtttttcagttggtctttgcaaagatagtgcaagccgaaagctgtgtcaaatttatttggttacagctgaggcgccgcttatcttctgtaaagatagtgcaagccggaagccgagtcaaatttatttagatgcaaccgaggcaccgcctgttttctgtaaagatcgtgcacgcggaaggttcggttttgtcggaagcggccgggggctgcctatttgccgtaaagttagtgaattttatcctttctttgccggagaacatcgaataaggagtgtgcgttgtgtgaaaatcccgtcgtatggcgatcgattcactactttcggcaggagaagatcactattcccggcgagtcgcgtgttttcccgatccggtctttttttgcggcgcttgaaaatatcgagcgcagtgcacgatgaaattattcttgaagaaattttatttaatttgttgataagtagtgttatatgtatttttagggtggaagtggacgatatttttcggaaaagatggtgcgaatggtgtaataattgttacctttacccaataaacaaggcaggttcattctgatctttatcttctttgcattttcccggacctatatcccgtccggatttttccatcgttgaaatcgacctttgtaaactttctttgtttaggcaatttcgcttgagtatgtctgtcgcaggcagaagagagccgttgccgggttttaacgatgtcccgaaattgagattatttttttacttgcatacgcccgttctgaccgccctttttcagcgtggttcgggcagattgcgctgtcggggaacaaggtgtgcgtgactgcggtttcgaccgggaacaggaaacttcctcgcttccgtttttccgcttccgcaccggatgcctccgcgacagatgaaaactccgtcgtacgacggaattatacgatgattatgacatttaacgaattgaaaattaccgaccctattttgaaggcgatcggtgaaaaaggatacccggctcctacgcccattcaacaaaagggtattcccgtggcgctcgatgggcgcgatatgctgggcatcgcccagaccgggacgggtaagacggcggcgttcgccattccgatcctgcagcatttgagcagtgggatgcaggcagagccgaccgacgtgccgcgccgcaaccggcgggggcggaatcatggtcgggaatacggagtgcggccgatccgggccctgatcctgacccctacccgggagttggccgtgcagatcggcgacagtttttcggattacggaaaatatgtcggtctgaagcatctgacgattttcggcggtgtgaaacaaggcccgcaggtcgaggcgcttcgtggcggcgtggatattctgatagctacgccggggcgtctgcacgatctgatcggacagaggttcgtcgaactcgacgcgattacgcatttcgtgctggacgaagccgaccggatgctcgacatgggattcgtcgccgacatcaaacgtctgctgccgctgctgccgaagtcgcgccagaccctctttttttcggcgacgatgcctgcggacatagtggcgctctcgaaaagtatgctgaccgaccccgtgcgggtggaggtgactccggttgcgtcggcggtggatgcgatcgatcagcgggtctatttcgtggagaagccggagaagaagaaactgctcgtatctctgctccgcgaggaggataagtccgttctcgtcttctcccgcaccaaacacggagcggacaatatttcgcgtctgctctccaagtcgggtattcgaagcgaggcgattcatggcaacaagtcgcagaatcaccgccagcgcgtactcacggatttcaagtccggcaagatccgggtgatggtcgctacggacatcgctgcccgtggcatcgacatccgggaactggagatcgtcatcaattacgatctgccggatgtgccggaaacgtacgtacaccgtatcggccgcaccggtcgtgccggacattccggaaccgcccttacgttctgcaccccggacgagcggccgcttatgaaagacatacagcggctgacgggcaaaaaactcaatgcggaaacataccgtgcataataatctttaagttgaatttaatggcaaaatcgcaaacattcggaaaaagagagaacgaaaagaaaaagcaggccaagcgcctcgaaaaacagaaacgcagggaagaacgtcaggccggaggaagctcttcgctcgacgatatgatcgcctatgtggacgagaacgggaatattaccgacactccgccccagctgcggccgaaagtcgagatccagctcgaggatatcgtgatagccacgcctaaaaaggaagatattgcggccgaaccgctgaaagggcgtgtcgagtatttcaataccgagaaggggtacgggtttatcaaggacctggcttcgacggaaaaatattttttccatatatcttcggctcccgaagggatcggcgaggggcggatcgtccttttcgaactcatgcggggtacacgcggtatgaatgcggtgaaaatcgcatttgcgcaataaacatttatccacagtcaaaatagaaaaaaatgaacatttacgtatcgaatttgaacttccgcacccggggcgagagtttgcagactttattcggggagtacggagaagtatcttccgccaacatcatcaccgaccgcgaaaccggccgctcgcgcggcttcggtttcgtcgaaatgccggacgagtcggccgcacggaacgcgattaacgcgctgaacggtttcgagctcgacgagcgggctatcaacgtcaatgaggcccgtccgaagaccgagcgcagcgaccggggtggttacggctccaatcagggcggcggttacgggcgcaaccggtattgattcggatcggccggaaagagcggggaggagcgttgaacgcccctccccgctcttcgataaggccgtgctttttccggcgggggatgggggcggaggtttccggaggaacgctcgatggccgtccggtcgggtggacgggcgtcggagcgcggaccgaaacttctgccggggcgtatcgttctgtcgttgcaggatgccggcgaaattttttggccgggttatcttgccgaaaccgtaaattatgcttacctttgcccctgataacaccggaacccgatcaagccaatgtttagtttcataccgaacgcatttcaggaggcccagtacgtacggcgccgtcatttccggggtaatcattcggaaaatatttccaatttttattataatttttccaagttattagggtagctgtccaagttgccctatttttttgtgcacccgctgcggcgaggtgcgaaacggtacagcaaaatgaagacgattctcaatggtgcgaagttctatcgggacggaaggttcgaaacgggcgatctggcgatcgaagacggtaaaatcgttgccataggcggtcgggtcgcgcttgaggcggacgaccgggcagtcgatttgacgggttgtcatgtattgccgggattggtcgatgtgcatgtccacctgcgcgaaccgggtttttcggagaaagagaccattgcgacgggtacggctgccgccgcgcacggaggttataccaccgtttgtccgatgccgaatctcaatccggctcccgattcgccggagcatctggaagcggagctggctctgatccgccgcgatgcggtcgttcgggtgctgccttacggttccattacgcggggacagaagggacgcggggagctggtcgatttcggggctctggccggagaggtcgtgggcttctcggacgacggacggggggtgcagggggaggagctgatggccgaagccatgcgtcgcgccgcagcggtcggcaagccgatcgtggcccattgcgaagtcgatgaattgctgaaaggagggtatatccacgacggtgtttattgccgcgagcacgggcacaagggtatttgctccgagagcgagtggcggcaggtggagcgcgatataaaattggcagccgaaaccggatgtcagtatcatgtctgccacgtttcgaccaaggagagcgtcgagctgattcgccgggcgaaggccgccgggttgaaagtcagcggcgaaacggctccgcactacctgctgctctgcgacgaggatttgcaggaggacggtcgtttcaagatgaatccgccgctgcggggacgtgaagaccgcgaagccctgcggcaggccgtcgccgacgggacgatcgaggtgatcgccacggatcatgcgcctcacaccgccgaacagaaatcgcgcggattggccggcagcgcgatgggtatcgtggggttggagtgtgctttcccgctgctctatacctatttggtgaagccggggctgcttacgctggagcagctcgtcgagcggatgtcgatggctccgcgccggattttcggcctcggcggaggcttgcaggcgggcgaaccggctgatttaacggtgttcgacctcgatgcggagtacgagatcgatcccgaaaccttcctgtcgaaaggccgcgctacgccttttgccggctggcgggttgcgggccgtacgctctggacgctggtcggaggacgtacggcatacgcgacggagcgtttccgatagacggggcgggagcgatgtgcgcggattgtcccggatcggaatacgaaatgcgattccgtttttcgacgggcggtgactgcggtcgtcgcggattctgccggatgcgggaaacagggccggaaattgaaaaatgaacgaagacaaattacgaaataaccgaatatgaaaccattcaccaaaaaaatcgtgcttgagtcgggccgcgagttctacggctacggtttcggcgcggaccgggaggcgacgggcgagatcgtgttcaatacctcgatggtcggctaccaggagattctctccgatccctcctataccgaccagatggtcgtgatgacctatccgctgatcggcaactacggcattacggacgaggattacgaaaccaagtatccgactatcggcggtatgatcgtgcgcgaatacaacgacctgccgagtaatttccgctataccaagacccttggcgaagtatgcgaggagtacggcataccctgcgtctgggggatcgatacccgtatgctgacgcgcattattcgtgacgagggtacccagcgggtgatcgtcgtcgatgcgtcgatgccgcaggaggaggccctgcgccgcctgaaggaggcgcccgtgcgccgcgacatggtcgagcgcgtgagctgccgcaagcgttggttctcccgcacggccaatcatcgtttcgacgtggtggcggtcgattgcggcatcaagcacaacatcatccgcaagctcaacgagaagggttgcaacgtgacggtagtgccctacgatattacggccgaggaggtgatggctttccgtcccgacggacttttcctctcgaacggtcccggcgatccgaccgacgtgcagccggtcatcgagatggtccgcacgcttcgggggcgcctgccgatcttcggtatctgcctgggacaccaggtgatttcgctggcttacggagcccgcaccttcaagatgaaattcggacatcgcggcggtaaccaccccgtgaagaacctcgaaacgggcaaggtcgagatcacgagccagaaccacagctttgcggtcgatacggagtcgctgaagggcaccggactgacccttacgcacctgaatctgctggacgataccgccgaaggcgtcgaatgccgcgccgatcggattttcagcgtccagtatcatccggagagtgcgcccggtccgcaggacagcacctatttgttcgataagtttatcaaaatgatggaggagagtcaaaatgcctaagagaacggatatcaagaaagtgatggtgatcggctccggcccgatcgtgatcggccaggctgcggagttcgactacgcgggtacgcaggcttgtctggccctcaaggaagaggggtacgaggtcgtgttggtcaattccaatccggcgacgatccagaccgacgtgcagattgccgataaagtctatatggagccgctgacgctcgagtacgtggccaagatcgtccgttacgagcgtcccgatgccatcgtgccgggactgggcgggcagacgggcctgaatctggccgtgcagctcgccaagaaaggcgtgcttcaggagtgtcaggtggagattctgggtacttcgttccagagcatcgagcaggccgaggaccgcgaactcttcaaggagctttgtcagtcgctgggcgagccggtgctgccgtcgctgattgctaacaatatcgacgaggcggtcgaggcggcgaagcggatcggttaccccgtcgtgttgcgtccggcctttacgctgggcggtacgggcggcggcttcgccgacgacgagacgcagttgcgcgagatgatgcgcaatgcgctttccctctccccggtgcatcaggtgctgatcgagaagagcatcaaggggtataaggagatcgaatacgaggtgatccgcgaccacaacgatacggccattgcgatctgcaatatggaaaacatcgatccggtcggcgtccatacgggcgactcgatcgtggtggctccgagccagacgctgaccaacaaggagtatcagttgctgcgcgacagcgccctgcggctgatccgtgccctgaagatcgaaggcggctgcaacgtgcagttcgcgctcgatcccctctcgttcaactactacctgatcgaggtcaatccccgcgtgtcgcggtcgtcggctctggcgtcgaaggccagcggctatccgatcgcccgcgtcagcgccaagatcgccgtgggccttacgctcgacgagatccgcatcgccaatacgccggccagcttcgaaccggctctcgactatgtggttaccaagatcgcccgcttcccgttcgacaagttcagcgacgcttcgaaccagctcggaacccagatgaaggcgacgggcgaggtgatgtccgtgggccgcacgatggaggagagcctcctgaaggcggtgcgctcgctcgaaacgggggtctgccatatctaccataagaaattcgacgactggacggtcgatcggatgctctcctatatcaaggagggaacggacgaccgtctttacgccatcgccgagctgatccgccggggcgtcgagctggcgctgatctacaacagcaccaaaatcgacatgttcttcctcgagaagtttaagaacatcgtcgagttcgaaaaggtcgtagcggccaatccccgcgacatcgaaacgttgcgcgacgccaaacgcatgggttttagcgacaagttcatcggtcagttgtggggcatgagccagaaggagatgttcctgctgcggcgcgagcacaatattttcccggtttataagatgatcgatacctgcgcgagcgagttctcctcctatgtgccgtatttctattccacttacgagcaggagaacgagtcgatcgtgagcgaacgcgagaagatcgtggtgctcgggtcgggaccgatccgcatcgggcagggcgtcgagttcgactattcgaccgtgcatgccatctggtcgatccgcgccgccgggtacgaggcgatcatcatcaataacaatcccgaaaccgtttcgacggactataccaccagcgacaagctctatttcgagccgctgaccgtagaggacgtgatgaacgttattacgctcgaaaaaccgaaagggatcgtcgtgtcgctcggcggccagacggcgatcaacctcgctgagccgctgcacgaactgggtgtgccgatcatcggtacgggtgtcgaggcgatacggaatgccgaagaccggggttgtttcgagaagatcatggaggagttgggaataccccagcctgaggccgaggccgtgaccgatatcgaagccggtgtgcgagccgccgaacggatcggctacccggtgctggtgcgcccgagctacgtgctgggcggccgggccatgcagatcgtttcgaacgaggagcgtttgcgccactatctccagacggcggtcgaagtcaatgaggacagccctgtgctggtcgatcgttatattatgggccgcgaactggaggtggacgccatctgtgatggcaaggatgtcttcattcccggtatcatggagcacgtcgagaagacgggcatccactccggcgactcgatcagcgtctatccgaccttcagcgtgagccagaaagccaaggacaagatcatcgattataccgtgcggctgggccgccggatcggtatcgtcggtctgtataatatccaatttatcctcgacggggaagaggacgtatatgtgatcgaggtgaatccccgttcgtcgcgcaccgtgccgttcctttcgaaagcgacgggtgtcccgatggctgacatcgccacacgggtcatcctgggtcattcgcttcgggagcagggcattaccgaagtatatggcagggagcgctcccgctggttcgtcaaggccccggccttctcgttcgccaagatccggggcatggagtcctacctctcgcccgagatgaaatccacgggcgaggcgatcggatacgacaacaagctcacccgggcgctctacaaggcgctccagtcgtcgggtatgaccgtcgccaactacggtacgatcttcctcacgatcgccgacaaggacaagcaggatgcgctgccgctggtacggcgcttttatgacctgggtttcaatatcgaggcgacgaagggcacggcggaattcctgcgtcagcatggtattcgcacccgtacgcgccgcaagttgagcgaaggcagtacggagatcatcgactcgctgcgccagggccatgtgagctatgtcatcaatacgatcgacatcaaccagcacaacacccggctggatggttacgagattcgccgcacggccgtcgagaacaacgtgacgatcttcacggcgctcgaaacggtaaaggtcctgctggatgtattggaggagataaccctgggtgtttcgaccattgatgccgaatagttttcgatttcatgcggcaactgcgtcacatccctctttgatccgaatggaaaagacggatagtgttccccatccgcttcaaagtcacgatgcaccgcatttgtcggcctgaaatcaaaagcgagtttcgttcagagggcacctttcgcaccttctcgcagtccgcgacagtcccataccagcgagtatgctcttgccgtgtcctgcttcggtcggcgcgaaaccggctcctttgaaattgagacgaaagcgaagcacatagtttggaaaagaaaaatgtataaaaaaggcatatatactgttacggccaacgaaccgctgacgccctccgtctggcggatgacgctcgagggggatacgcaatacctgacccgtcccgggcagttcgtcaatatcgaggtcgaagggctctacctgcgccgtccgatttcggtgtgcgactacgacgagcggacgctgacactgatctataaggtcgtcggcgaaggcacggcccggttgagtgaaatgaaggcgggcgtcaagctcgacctgctgaccggcctggggaacggcttcgatccggatgcggagtgccgcaggcctctgttggtcggaggcggagtgggcgttccgcccctctacaacctggccaaaaaactgattgacaagggtagaaaagtgactgtggtgttgggattcaataccgcttcggaggttttctacgaggaggagtttcgggcgctcagtgcggaggtcttcgtaacgacagcggacggcacgcacgggacaaagggtttcgtaacgacggcgatcgctgaaaagaagccggattttgattatttttacgcctgcggcccgctgccgatgctgcgtgcattgagcgatgcgacgggcgacataccgggcgaattgagtttcgaggagcgcatgggctgcggcttcggcggctgcatgggttgttcctgtcagacgaaaaacggggccaaacgcatctgcaaggagggacccgtactgaaaaaggaggagattatatggtaaacgaacccaagaaaaacttcgatacgtcggtgacgttgagcggccttcggctggataatccggtcgtgccggccagcggtacgttcggttacggcaacgagtacaaggatttttacgacatcaacatccttgggtcgttttccttcaagggaactacgcgcgaggcacgcttcggcaaccccacgccccgcatcgccgagtgtacggcggggatgatcaatgccgtcgggttgcagaatcccggtatcgatgcggtgatcggcgaagagcttccccggctgaagacattcttccgcaagccggtgatcgccaacatcagcggtttttcggtcgaggaatatgcctattgctgcgagcggatcgacaaggaggaacaggtcggtttgatcgaggtcaatgtaagctgtcccaatgtgcggcacggcggcatgagcttcggaacgtcgcccgaagcggcggccgaggtaacgcgtgccgtgaaagccgtgactaccaagccggtctatatcaagctcagtcctaacgtgacggacatcgtggcgatcgcccgggcgtgcgagcaggcgggggccgacggcatctgtctgattaacacgatgctgggcatgcggatcgacgtgaaatgccgcaagcctatcatcgccaacgttatgggcggattttccggtgcggcgatcttccccgtggccgtgcggatggtttatcaggtagcccgggcttgccggattccggtgatgggttgcggtggcgtggaaacggcccgcgacgttatcgaaatgatgatggccggggcgacggccgtacaggtgggggccgccaacctgcggaacccttatgcctgcaaggagatcgtcgaggcattgccccgcgaaatggagcggctggggatcgaacggctgtccgatattatcggcatcgtgaagtaattttgtgaaaattataaagaagcaagagatatgaccaacagagacgtaatcatcgcctgcgatttcagcagcgccgaagagactttccggttcctcgatctgtttaagaacgaggcccgcaaacctttcctgaagatcggcatggagcttttctatgccgaagggcccgaaatcgtgcgtgagatcaagcgccgggggcaccggattttccttgatctgaaactgcacgacattcccaatacggtcaagaaggcgatggccgtgctttcgcgcctcgacgtggacatgtgcaacgtgcatgcggccggcacgatcgagatgatgcgtgcggcggtcgaagggctgacccgtcccgacggcacgcgcccgttactgatcgccgtgacgcagcttacttcgacttcggaggagcgtatgcagcgcgagctgctcatttcggcttcgatcaacgatacgatcgtcaagtatgcgcagaatacccgcgaagcgggactggacggcgtggtctgctcgccgctggaggccggtatggtgaaggcggcctgcggaaaggagttcctgaccgttacgcccggcgtgcgttttgcggacggagaggtggccgatcaggtgcgggtcacgactccggcgcgtgcgcgggaaatcggctcggactatatcgtggttgggcgtcccatcacggcggcagccgatcccgtggcggcctatcgccggtgcgtggaggagttcgtgaaatagagtgtgcgacggtagggagtatttcgggcggtacggaaggaagggctgctttgcggcccggatcgagcgatacggacgggattcgtgtcgtgcggcagttgtctaaaatgggtttgggagcgtggagttcgcggaacttcggtcggcacgggtgttgccggatcgtgcgaacggaatgcgcgccgaattgcggcgaccgaagaggccgattgccgcgacaggcaagaaataagttttactctaaatcaagaaagttatgaaaccggttacacttttctatcagccccggtgccccttctgcaagaaggcgctgggttatctggaggaactgcagcggcaggaaccgtacagccgcatcgaaatcaggatgatcgacgaactggccgaacccgaagtggccgaccgttacgactactattacgtaccgacattttacgtcggggacaagaaagtgcacgagggcggtattatgcccgacgaggtggaggccgtactccgtatggccctcgacgagcgataggcggaaagccgtttttgcggaaaaaggaatgacaatctaaagaatgtagaaatagttatggaaagagaaattgccaaaggcctgctctcgatcggtgcggtattcctgcgccccgagcagccgtttacctgggcgagcggtatcaaaagcccgatttattgcgacaaccggttgattctgaccgcccccgaggtgcggaagaaggtcgaggccgcgattgcggaaacggtgaaggcgaaattccccgcgtgcgaggtgctgatgggaacatcgacggcaggcatcgctcatgcggccatcgccgcgacgatcctcgacctgccgatgggatatgtccgcagcggctcgaaggatcacggtcgagggaatcagatcgagggtaagctcgataaggggcagaaggtcgtggtgatcgaagacctgatttcgacggcgggatcgtgtatcgaagtggtcgaggcgttgcgtgcggcgggtgccgaggtgctgggcgtagtgagcatttttacgtacggtatgaagaaagggttggagcggcttgctgcagccgacgtaatcaaccatagcctttcgaatctcgatgcgctggtcgaagtagcggccgaggaggggtatatcaagccggaggatcggcagcgcctgatcgccttccgcgacaatccttcggacgaaagctggatcaacaaataaaccgctatgcgccatttaatcgaccctacggatctgtcggtcgccgagatcgggcagatcatcgccctggcggaagacatcatcgccaaccgggccaaatacagcgaagcctgcaagggcaaaaaacttgcgacgctcttctacgagccttcgacccgcacgcggctgagtttcacttcggccatgctggagctcggcggcagcgtcatcggtttttcggacgccgcttcgtcgtcggtgtcgaaaggcgaaacggtcgccgatacggtccgggtgattcgttgcttcgccgacattatcgccatgcgccatttcaaggagggggcgccgctggtcggctcgcagtatgccggtatcccggtcatcaacgccggggacggtagccacagccatccgacgcagacgctcaccgacctgctgacgatcaagcgcgagaaggggcggctggatcacctgacgatcggcttctgcggcgacctgaaattcggccgcacggtgcattcgcttatcaaggcgatgtcgcgctacgaagggattcgggtggtgctgatcgcccccgacgagctgcggttgcccgagtatatgcttcatgagatcgaaacccagaccgaaggggtggaattccgcgaggtatcgacgatggaggaggtgatgcccgagttggacattctctacatgacccgcgtgcagaaggagcgtttcctcgacgaagaggagttcaaccgcgtgaaggacagtttcgtgctggatccgtcgaaactccgcacggccaagtcggatatgatcgtgctgcatccgctgccccgcgtgaacgaaatcacgcgtgcggtggacaacgatccccgggcagcctatttccggcaggtcgagaacggtaagttcgtgcgcatggctctgatctatacgttgctgaaatgggccgaaggcgagaagctcgccgcagtccccgacctggccgaggggatgttcatagaccggagtatgaaatgccccaactcccggtgtatttcggctacggaggatgtcgatccgctttttgtcaaagcgggagacacctgccgctgcgcttattgcgaggcgaaaatccggtagcggattttgtcgatacaatgtcgaaataaaactgtcgggattgttaggttgtcgttgaaattattcgtacttttgtgcgagtaaaaggcgatgggccgcaggtccgtcggcggctacgacttccgaaacgatggaaaggattcagatgcaccatacccggcgaaagcgacagcagatgctgtcggctcgatgtgcggccggagcgtgcagtgtcgttcctgcatcggattttatcgacggaactatgcaggagggcacgaatcggcttcccgcagcaatataatcttgccgctatgacgaattctgtcgtagcggctcttttttggttgatttagtacgtttcttactatgaaagttggagtaatcatgggttcgatcagcgactgggacgttatgtccgacgctgcggcgacgctcgcgcaattcggtgtggagttcgagaagcgggtggtgagcgcccaccgcacccccgaactgctggtggagtatgccaaaacggccaagtcgcgcggactggaggtaatcatcgccggagccggaggcgctgcgcacctgcccggcatggtggccagtatgaccgcacttccggtgatcggtgtgccggtcaaatctcgagccctgaacgggctggattccttgctttcgatcgtgcagatgcccggcggcgtgccggttgcgaccgtagcgatcaacggggcgaagaatgcggccctgatcgccgtgtcgatcctggcgttgaaggacgaggcgctggcggcccgtctggagatgttccgtgcaaaacagactgaggatgtacttaaagcggaactttagaccgatgagtgcggtgaagacgatcggaattatcggtggcggccagttggggctgatgatcatcgagcaggcgcatctgctgggtgcgcggacgatctgcctcgatccggcggaggatgctccggcgtttaagatcagcgacgagcggatcgtgggccggttcgacgatccggcggcgctcgaagagctttgccgccgcagcgacgtggtgacctacgagttcgagaacgtgccgggcgatctgctggtggctctcgagcaaaaatacaatatcaaacaagggttcaggcctctgttcgactcgcaggatcgcctgcgggagaagagcaatgcctgcgatcatggattgaagacgcccgctttcatggctgtcgatgacgaggagtcgctgcatcgggccattgcgcgaatcggttatccgtgcgtgctcaagacccgtacgctgggctacgacggacacggtcaggcggtgcttcgcggcgaggccgaccttgcgaaagcccgcgaactgctcgcggtgccctgcattctggaggagttcgtcccgttcgatttcgaggccagcgtggtgctggtgtcggacggagagcgcgtgatctgcttcccggtagggcggaatatccacaaggacggtattctggatctgtgcatcgtgccggcggagatgccggaccaggtgcgggagcggatggtgtcccagagcaagcgtttcatgcgcgactgcggttaccgggggattctggctatcgaatatttcgtgaagggagacgaggtctatttcaacgaaatggcgccgcgcccgcacaacagcggacactggaccatcgagggttcgacgaccaatcagttccgggagctgtgccgttacctgctcgatatgcccctcgaagagccgcagctgaaggcccctaccgtgatgaaaaacatcctgggacaggatctggagcgggccgaggcgcttgcccgggagaatcgccccggtgtgtatgtccatatttacggcaagaccgtttccaagcccaagcgcaagatgggacacgtgactttcgtcggtgtgaccggcgaggagtatgccgccaagtgggccgacagatttgtgaaataaagtcaaaaataagataatgaagagttaccgtattttcgttgagaaataccccgaattccgggtcgaggccgagagcctgctccgcgacctgaatgccaacctgaatctttcgctcgacggcctgcggctgctgaacgtgtacgacctgttcggtttttcggacgaattgctggagaagagccgttacagggtcttcggcgaggtggttaccgatgccgtgacggattcgtgcgatctgggcggcaacagctttctggctgtggagtgcctgcccggacagttcgaccagcgagcggcttcggccgtggactgcgtgcggttgatcgatccttcggccgaggtgaagatcaagagttcgaagctgctgatcttcccttcgaaacttcccaaggagacgatggagcgtattcgtcgctattatatcaatgccgtggagtcgcgcgagaaggatttgcgggtcctggacgatttggaaagcgcccccgtgaaaccggtgccggtattggacgggttccgggagatggaagatgcggaactcgatgcctactgcaagaagaacggtctggcgatgaatgccgacgacctgcgcgaagtggtcgaatatttccggagagagggtcgcgatccgttcgaaaccgagctgcggattctcgatacgtactggagcgaccattgccgtcatacgaccttcacgaccgagctggagaacattacggtcgaggagtcgttcgtgaaagacgagatcgaaggcacgctggcgctttacctgaaaatccgccgcgaactggggcgcgagggcaagagcatctgcctgatggacctggcgacgatcggtgcccgttacctgcgcagcaagggactgctcgacgacctggaggtgagcgaggagaacaacgcatgcagcgttttcgtcgatgtggacgtcgatgaccggaccgagaaatggctcctgcaattcaagaacgaaacccataaccacccgaccgagatcgaacctttcggcggagcttcgacctgcctgggcggtgccatccgcgatccgttgtcgggtcgcagctacgtctatcaggcgatgcgtgtgacgggtgcgggaaatatctatcaacccgtaagcgaaacgctgcccggcaaattgccccagcgcgtcatcagcctcaaggccgctgccggttattcgagctacggcaatcagatcggactggccacgacccacgtccgcgaggtgtatcatcccgactatgtggccaaacgcctggaggtcggtgccgtggtcggtgccgtgaaagccgaaaacgtgcgccgggagtcccccgtgccgggcgatgtggtcctgctgctcggcggccgcacgggccgcgacggtgtcggcggtgcgacgggttcgtcgaaagagcataccgacaagtcgctcgaaatgtgcggcagtgaggtgcagaagggcaacgcccccgaagagcgcaagctggagcggttgttccgccgtccggaagtgacgcgcctgatcaagaagtcgaacgacttcggtgcgggcggtgtgagcgtagccatcggcgagctgaccgacggcctggatatttacctcgatcgcgtgccgaccaagtacagcggtctgaatgcgacggagctggcgatcagcgagtcgcaggagcgtatggccgttgtgatcgaagcgagtgccgaagaggagttcaagcgctactgcgccgaggagaatatcgaagtgacccatgtggcggacgtgacggactcgcgccgtatgcggatgtacaacaagggcaaattagtggtcgatctttcgcgcgagttcatcgacagcgcaggggccaagcactatgcccaggccgcgatcggtgcggtcgaggaacgcgatcctttccgccgcgaggtgaagggcggtacgctgcgcgaaaagatgcttgcgaacctggcggacgacaatgtcctctcgcagaaggggctgatcgagatgttcgattctacgatcggcgcttcgaccgtgctgctgcctttcggcggtcgtacgcaacgttcggaaacacaagtgtcggtgcagaagctgccgacggacggatataccgatacggccagcattatggccttcggctacaaccctttcctggcgtcgtggagtccctaccacggtgcggcctatgccgtcgtggacgctgcggccaaagtcgtggcggcgggtgcccgctacgataagatgcgctattcctatcaggagtatttcgagcgcatgaccaagtcgccccgtacgtggggcaagccgctcggggcgctgctcggtgccctgaagatgcaggtcgagctgggactgccctcgatcggcggcaaggactcgatgagcggtaccttcgagcagatcaacgtcccgcctatgctgatggccttcggtattacgactgtcgatgccggacgcgtcatctcgaccgatttcaagaaggcgggccattcgatttacctagtgcgtcataccccgctcgaaaaccatatgcccgataccggggcgttgaagcggaatttcgatttcgtaagttcggctatcgagtccggcaagatcgtttcgggctatgccgtcggcttcggcggtgtggcggaagcgctggccaagatgtctttcggcaacggcatcggtgccgatgtcgaggtggatgaagcgacgttgttcgacaactcttacggttcgatcgtggtggagagcaccgagccgctcgatttcccggccgccgagttgctgggacataccgaggcggaggaatcgctcacgatcaacggcgaaaaaatgccgctcgaagagctttaccgggccaataccgaacgctttgcgacggtttatcccgataagggaatcaaccatgcgccggtcatggaggcgatgccggctctccgcagcttcacctatccgggcgaggcggtcgagcgtccggtggttttcatccccgtattcccgggcagcaactgcgactacgacaccgcgaaggccttccgccgggcgggtgccgaagtgcgcagcgaggtgttctgcaacctgacggcggaggctattttcgactcgatccgccggatgaaggaggcgatcgctgcgtgccatatcttcgtgctctgcggcggcttctcggcgggcgacgagccggacggcagcggtaaattcattgccaatgtgctgaacaacaaggatatttcggaggaaatacatcgtctgctcgaccggggcggcctgattctgggcatctgcaacggcttccaggcgctggtcaagtcgggcctgctgccctacggacggctgggcctggtgaccaaagagtcgccgacgctcttccgcaacgacatcaaccgtcatgtgtcgcagattgtttcgacccgcgtggcgacgaccaactccccgtggctgtcgagtttctcggtgggcgatatccattcgatcgccgtgagccacggcgagggcaagttcgtcgtgaacgagcctctggcccgcgagctgttcgagaacgggcaggtggcgttccagtatgtcgatgccgaaggccgcgtgacggccgaagccccgtacaatcccaacggatcgtattatgcgatcgagggtatcgtgagccgcgacgggcagatactcggtaagatgggccatacggagcgttacggggagaacctctttaagaacatcgccggagagaaggtgcaggacatcttcacgaatgcggtgaactatttccggaaaacaaaataacaattataaaataccaaccactatgcaacaaggcgaaatgctttacgagggtaaggccaaacaggttttcctgacggacgatccggatatgatcctgattcactacaaggatgcggcgacggcgttcaacaacatcaaaaaggccacgatcgagaacaagggcgtgctgaacaaccggatctcgaccctgatcttcgaatatctcaacaagcaggggatcaagactcactacgtgaagaccctgaacgaccgcgaccagttgtgccgccgtgtgcggatcattccgctggaggtgatcgtccgcaacgtcatcgccggctcgatggcccagcgtctgggtatcgaggagggaacgaagccttcgaacgtgattttcgacatctgttacaagaacgacgagctgggcgatccgctgatcaacgatcatcatgcggtggcgctgggtgtcgtaacctatgacgagttgaaacagatttatgccatgaccgcccggatcaacgaggtgctcaaggagcttttcgccaagatgaatatcaacctgatcgacttcaagatcgagttcggccgcacgtcggacggcgagatcgttctggcggacgaggtgtcgcccgatacctgccggctgtgggatatggctaccaacgagaagctcgacaaggatcgcttccgtcgtgacttgggtaaggtgcgcgaggcttacgaggagatcctggcccgtctggaaaaagtaatcaaataagttccgatgcacaaagagagcataatgcagccgatctgcgaccgggagctgcacgaggagtgcggcgttttcggcgtcgtgggagtgcccgacgcagctaacctgacctactacggccttcattccctgcaacatcgcgggcaggaagggtgcggtatcgtaagcgtttcgaaggaaggggcgatgcggcgtgttcggggcgaaggacttgttacggaggtgttcaacgaagccaagctggcaaaccttgcgggcgatatggccatcggtcatgtccgttattcgacggccggtggcggcgggacggagaatatacagccttttctgttccatcataacacgggtgatttcgcattggcccacaacgggaatatcgtcaatgcggatctgctgcgcaactacctggagaacaagggcagtcttttccagtccacttcggacagcgaagtgttcgcccatcttatcaaaaaggaggtacgcaaccacaaccggccccgtatctattcgatcatcgaggcgctcaatatgctcgaaggagcgttcgcgtttctggtgatgacagccaaccgcatctatgcctgccgcgataagtacggtctgcggcccctttcgatcggcaagctgggggacggttatgtgatcagcagcgagacttgcgccttcgaggtggtgggtgccgaattcgtgcgtgacgtagagcccggcgagatcgttacgatcgatcggcacggcatccgcagcagcgactattcgatgttcaagcgccatatgatgtgtgcgatggagtatatctatttcgcccgcccggacagcgacatcgagggccgtaacgtgcacgccttccgcaaggagtcgggacgcttgctctacaaggaggcgccggcagacgcggacatcgtggtcggagtgcccgattcgagtttgagcgctgccatgggatacgccgaagcgagcggtcttccctacgagatgggacttatcaagaacaaatacatcggccgcaccttcatccagccgtcgcagtcgatgcgtgagaagggcgtgcggatgaaactttcgtcggtgagcggtatcgtttcggggcagcgtgtggtgctgattgacgattcgatcgtgcgcggtaccacctcccggcgcattgtgcgtctgttgcgtgaggcgggggccacggaagttcatgtccgcatcgccagccctccgttcaagaatccctgtttttacggtgttgatacttcgacgtacgaggagctgctgtgcgcccgcatgtcggttccggaggcgtgcgagtatatcggagccgattcgctggcttacctctcgcccgatgccttgctgaaggcgggcaatcgctgcgagttgtgcatggcctgcttcacgggcaattatccgacgtcgctttacgggacgatcgaggaggcgaacaaaaaagaaaaatgttaaacaaaccgcttcgttttcgatctgcggtgtcagggaagaacctgtcctgcatgcgtatttcgaaaacatcgggtggaaatattcaggaaacagctaaaaccaactattgttatggcggaaagttatgaaaaggccggtgtgaacctcgaggccggatacgaagtggtgcgccgcatcaagaaacacgtggcttcgacctcgcggttgggcgtgatgggtaacatcggcgccttcggcggaatgttcgatctctcggcgcttaatgtcaaggagccggtgctcgtgagcggtaccgacggcgtgggaaccaagctcaagctggctttcgagatggataagcacgacacgatcggcatcgacgccgtggctatgtgcgtgaacgacgtgctggcgcagggggccgagccgctcttcttcctggattatgtagccgtggggcacaacgagcctgcgaagatcgaagcgatcgtggcgggtgtggccgaaggctgccgtcaggccggctgtgcactcatcggcggcgaaacggccgagatgccgggcatgtatgccggcggcgagtacgatattgcgggcttcacgtgcggcgtggtcgagaagtcgcgcctgatcgacggtacgaaggtgcgtgtgggcgacgtgttggtgggtatcgcgtcgagcggtgtccattcgaacggtttcagccttgtgcgtaaggtggttgccgatgcaggactggatcttcgcaaggcttatcccgaattggacggccgtgtgttgggcgaggtgctcctgacgccgaccaaaatttacgtgaaacaggtgctcgaagtgatccgagcctgtaacgtgcacggcatcagtcatatcacgggcggcggtttcgacgagaatattccccgcatcctgagcgagggccagggtatcgagattcacgaggggacgtgggagatcctgcccgtgttccgcctgttggagaaatacggcaagatcgctcaccgcgagatgttcaatatcttcaacatgggtatcggtatggtgatcgcggtttcgcaggatgaggcttccgaagtgattgccattttggagaaacagggcgagaaagcttcggtgatcggccgggcgacggatcgtccgggcgtggaaatccgatagggcgatgaagacgatcgcagtattcgccagcggaaacggctccaacttcgaagcattggctgcggcttgtgccgatgggcgcattgcggcccgcatcgccctcatggtctgcgacaagccgggggctttcgtgaacgagcgggctgcccgttacggtattccgacttttacgttcaaccccaaagagtacccttcgaaagccgactacgaacgggagatcgtccgcaggcttcgggccgaaagggtcgagctgatctgtctggcggggtatatgcgcatcctttccgatgtggtgctggaggcgtaccgcgaccggatcgtcaatattcatccctcgctgttgcctgcgttcaagggggcgcatgccattgccgatgcctttgcttacggcgtcaaggtcttcggcgtgacgatccactatgtgaacggagagctcgacgggggccggatcatcgcccagcgggctttcgagtatctggggagcgatccggaagagctggaagcccgggtgcatgccgtcgaacatccgctgtatgtggaaacggtggcaaagttggttgcggagcaataggatcgcgggaacgtcgcggtttagtgcggattcggacctggaaacacatcgtcggataccgtgaataacggcgaccgcgagtcgaaaacgataaaactacgtatatattaacgcgatcatatcctttagtgtacctctttggaaatgcagcgacccgagtccctttcgagaaaggattaggggaaggcggagtggtaaatgcggtcattggaccgcgaataagcgactctcggattcggtgttgagatcgtcggaaatggtatattgaaagatatgattgcctatataaattagcaatatgagagcattaatcagtgtgagcgataagaccggcgtggtggagttcgcgcgcggacttcgagagctcggctggcaggtgatcgccaccggcggtacgatgaaactgttggctgaaagcggcgtggaggtgatcaacatcagcgatgtgacggggttcccggagatctgcgacggacgtgtcaagacgctccatcccaaggtgcacggcggcctgctggctcgccgcgacgatccgaaccacctgaaagcgttgcgggagaacggcatcgagttcatcgacatggtgtgcgtgaatctctatcccttccgtcagacgatcgcccgcgaaggggtgacgatggacgaggcgatcgagaatatcgacatcggcggaccttcgatgttgcgcagtgcggccaagaactacaaggacgtgaccgtagtgtgcgacccggcggattatgacacgatccttgcggagattaggggatacggcaatacgactccccgattgcggttgcagctctcggccaaggcatatacccataccgccgagtacgatgcgatgatcgctacgtacatgcgtgaaaaagcggggctcgacgagaagttgttcctggagttcgatctggttcagccgctccgctacggcgagaatccgcaccagcaggccaagttctaccgcagcggcgaacgggtgccctattcgctggcctatgcccggcagctcaatggcaaggagatgtcctacaataacatacaggatgccaacgcagcccttgcgatcgtgcgggagttcgatgagccgttctgcgtgggactcaaacatatgaatccctgcggtgctgcggtggggcgggatgcggcggatgcctggacgaaggcttacgaggccgacaaagtgtcgattttcggcggtatcgtcgccctgaaccgacctgtgacccgtgaggcggccgaattgatgaagccgatttttctggagatcatcatggccccttcgtttacgcccgaagccctcgaagtgctctcgacgaagaagaatctgcgtctgctcgaagttccgatggagaagagcgatgcgaagcagcgccagttggtgagtgtgacgggaggattgctggtgcaggacctcgacctcgaaacacgtcccgtgacggcggatatgtgcgtgacggagaagcggccgacggaaaggcagctcgccgatctcgatttcggctggcgtattgtcaagcatgtgaagtcgaacgctatcgtagtggtgaaggacggtcgtacgctgggtgtcggagcgggtcagatgaatcgcatcggctcggcggaactcgcgctcaagcaggcccatgcccagggtgtgaccgaagggctggtactggcttcggacggctttttccccttcgacgactgcgtgagcctggcggctgcgagcggcgtcgaggcgatcgtgcagccgggaggcagcgtccgggacgaggattcgatccggaaggccaatgaatcgggtattccgatgttgtttaccgggatgcgtcatttcaaacattaaactgcggatttcgtgtccgtcggtcggattattttttatggacgatttccgagccgctctttgcggaaagtgcggtcgggaataaacgataggttatgaaagttttagtcgtaggcggcggtggccgcgaacatgccgtcgtcgatgcgttgtcgcgttcgccgcaggtttcgaagatatattgcgctcccggcaatgcgggtatcgctcgtcaggccgagtgtgtgccggtcaaggataccgatgtcgagggattgctttcccttgctcgtgaaaaagagatcgacctcacggtggtagggcccgaagcggcgctcgtggccggtatcgtcgatcgcttccgtgaggagggacttcgtattttcggcccgacgaaggcggcggcccgcatcgagtcgagcaaggagtttgcaaaagatctgatggggcggtacggtattccgacggccggttaccgggcgttcgacgattaccggaaggcttcggagtacgttcgttcgcgccctctgcccgccgtcctgaaatacgatggtctggctgcgggaaagggtgtcgttatcgcccggacgatggaggaggccgatgccgcgttgcgcgacatgttgctggacgacaagttcggcaagggacgtgtggtcgtggaggattttctgaccggacccgaattttcgttcatgtgtttcgtgtcggggcgcaaggtgctgccgatggtgctggcgcaggatcacaaacgggcgttcgacggcgatgaaggtcccaatacgggcggtatgggagcatactccccgctgccgttcattactccggaagacgaggctttcgcattggaaaaggtgatgcagcgcacggccgacgctctctgcgacgagggatgtcctttcacgggcgtgctttacggcggtttgatgaagaccccgcagggaatccgcgtgatcgagttcaacgcccgtttcggcgatcccgaaaccgaagtggtgctgccccgcctgaagagcgacatttacgatattttcagcgctgtagccgacggacgggatccgggcgaggccgagtggcacgactttgcgactctggggatcgtgctggcatcgaaaggatatcccggctcctatgagaaggggtatgaaattacgggaacggagcaggtggacggcgtagtgtaccacatgggcacggcgataaaagaggggcggctcgttacctcgggcggccgggtgatgatcgtcgtctgccggagtgccgacccggagcaggccaggtgccgggcgctcgaggaggtccggaaaatcggttgcgagaatcttttctatcgatccgatatcggtatgaaggctctttcgtttttagtgaaaaaatagttatatttgtccttcgaatccctggatgggacggataagcaatctttaaaatcaaaacaatatatggtaatcagcggaaaagaattagcggcggcttgcaaggccaagatggccgagcaggtgaagacattcccggagaaatacggccggctgccccatttggtagtggtgctggtcggtgaggatgcgggcagcgtatcctatgtgacgggtaagacgaaggctgccgacgaggtcggtatcctgaatacgacgattcgcaagccggcggacatctcggaggaggagttgctgaaaattatcgacgacctcaatgccgacgatacggtggacggaattttgatccagctgccgctgccgaaacatatcgattcggataaggtgattgcacggattcgtcaggagaaggatgtggatggcttccaccccctcaatgtagcggctctctggcagaaacagccctgcgtgctgccctgtacgccgaagggtatcatgaagctcctgaaggattcgggcgtggagctggccggacgcaaagccgttgtgatcggccgcagtacgatcgtggggcttcccgttgccaagctgttgctcgatgagaatgctacggtgaccattactcacagccggacgaagaacctggcggatgtgacacgcgaagcggagattctggtcgtggcaattggccgtccgaagttcgttacggcggacatggtgggcgacggtgcggtggtgatcgacgtgggtgtcaatcgtgatcccgaaacggggaaattgtgcggcgacgtcgatttcgaggcttgcgagccgaaggcttcgctgatcacgaaagtgcccggcggggtaggtccgatgacgatcgcctgtctgatcgagaatacgatcgaggcattcctcaaaaaagttgcgaaatagattccgggtatctgtgcaatcgtgccgaatgaggacggattgccttgatgcggattatatatcgatatcaggggcagacgcaaggttttttccttgcgtctgcttttttatttgttttacaagggccgaactgcctgttttttgtgaatacgtgggaggggagaggtccgggcggtcgggtttcagcggatttcgcaccggacataaaataagggaagattcgatcatcgaatcttcccttattttgaagagcaagtccccggacttactttttcatcgtcttcagtttctctgtcaggatcggaacgaccttgtgtacgtcgcatacgatacccacgtcggcgacgttgaagatcggagcgaatttatccttgttcacggcgatgatgaagtccgactcctccataccggccaggtgttggatcgcacccgagatacccatggcgaagtagagatccggacgcaccgttttaccggtttgtccgacctggcgctcgtgtgcgagaacgccggcatcgaccatcgcacgcgaagccgatacttcggcgccgagcacgtcggcaagctcgcgcagggtttggaatccttctgccgtgccgacaccgcggccgcccgatacgagtactttggcttccgtaatgtcgatcatgttcttctgttccttgaccgtttccagaatccgtacacggaacttcgatttgtcgaaattgatttttacctcctcgacttttcctttgcgggtcggatcggccgctttggcacgcatcacaccggggcgtaccgtggacatctggggacgatgttccttgcagatgatcgttgccatcaggttgccgccgaaggcgggacgcgtcatcagcaggtcgccgtcttccgaaatgtcgagtccggtgcagtcggcggtaagtcccgtgccgatgcgggccgaaaggcgcggaccgaggtcgcggccgatgctggtggctccgatcagcagaatgctgggcttacgctcgtggatcacctgggtgatggcctgtgcgtatggctcggtggtgtactgggcgagttcatcggcttcgatcgaaaggaccacgtcggctccggctgcgatcagctcgtcggccttgtctttgacccctttacccagcagcagggcgactacctgctcatggagtgcgtcggccagttcgcgggcttttcccaaaagttcgagagcgacgttctgaacgactccgtcacgctgttcgacgaacacgtaaacgtttttatattgagatttatccatcttggtaagtaactgtttttaatgagtgttttcgataatcggggcagaatcgaacggattcgatactgtccggtcacaaaaacggctgttgtaaatgaacgatcggtaatttacagcttcgcagttgccggggccgatcagattatgaatttttctttcagcttctcgacgatcagatcggctgcttcggccggctccagctcgaagaccttacctgcggatttcgcacccttcgtgaaggatttgaagacgcgggtcggcgagccggcaagaccgagtttcgactcctcgaccgagatgttgtcgaagccccagacttccacctgcttgtcgtatgcctccacgatgccgcgtaccgacatataacggggctgattggccgaagagagtacggttaccacgcacggagtctccacctcgagcagttgatacccctcttccgtccatttcttgacgaccagccggttccctccttcgtatttgatgccttcgaggtaggtcacctgcggcaggccgaggtgttcggcgatctgcgggcctacctgggccgtgtcgccgtcgatagcctgacgaccggtaattaccaggtcgaaatccagcatgcggagagcgccggcgatagcgttcgaggtcgccagcgtatcggcgccggcgaatttgcggtcgctcaaatgaatcgcacggtcggcacccattgcgaaggcttcgcgcaggatgtcatcggcctgcgggggacccatcgtgatgacggtgacgtgtgcgccgtactggtctttcagctccagagccatttcgagtcccgccttgtcgtcggggttcatgatgctgggcacaccgtcgcggatcagcgttcccgtaacgggatcgaggcggatttccgtcgtatcgggaacctgttttatacaaactacaattttcattcgaatatctgttttttattgtttttaccttatgtgtccttgcgaggggagtacgaccggctttggggtttattccgaaaccggatgcacggtcgcccgccgctatttcaacagtgccgaggaaatcaccatccgctgtacttcggaagtaccttcgtaaatctcggtgatcttggcatcgcgcatcatgcgttcgacggggtattcgcgcgtgtagccgtatccgccgtggaattgcacggccttggtcgtcacttccattgcggtttccgctgcaaagagcttggcccgggcggcatcgaccgagaacgggagcttctggtctttcttgaaggctgcggcacgcactagcaggcgggcggcttcgattttggtatccaggtctgccagttggaactgggtgttctggaactgtccgatcgtccgtccgaactgtttgcgctccttgacgtatttcacggtttcgtccatcgccccctgcgcgatgccgagggcttgcgaagcgataccgacgcggccgccgtcgagggtcttcatcgcgatgctgaagcccttgccgaccttgccgagcagattctccttgggaacgatgcagttctcgaaaatcaactcgcaggtcgctgaaccgcggatacccatcttcttctctttcttgccgatcgagaaaccggggaagtcgcgctcgacgatgaatgccgagatgccgcgcgtaccctgcgacttgtcggtcatcgccatcacgatataaacgtgtgcgtaagcggcgttggtgatgaagattttgttgccgttcaggatatagtggtcgcctgcatcgactgccgtggtctgctgtgccgcagcatccgtaccggcgttgggctccgtaaggccgaaagcgccgagccattcgcccgagcagagcttgggcaggtatttcattttctgttcttcggtaccgtgctcataaatcggagcggcgcagagcgacgtgtgtgccgatacgaccacgcccgtagtggcgcatacgcgcgacagctcttcgacggccatcgaataaaggatgttgttgccgcctgcaccgccgtagttgacggggaagggaataccgaagattcccagttttgccattttctctacggtttccacagggaaacgttcctcttcgtcgatttcggcagccagaggtttcacctcgttttcggcaaattcgcggatcatttgccggaacagctgctcggttttggtcaattcgaaattcattttataagtatggtttttaatgattttaaacagtcatacctccatctacgctcaaaacggcaccattgacataggccgcttcgtcggatgcgaggtagagataggcggcggcgatctcctcgggacgccccaggcgacctacgggaactttggcccgcatgccgtcgagtacgttctcgggcatcttggcaaccatttcggtttcgatgaagcccggggctacggcattgaccgtgatgcccttgcgtcccagttcgcgagccatcgttttggtcatgccgatcaggccggctttcgtggccacgtagttggtctggccgaagttgccgtagagccctactaccgacgaggcattgacgatgcgtccgtagccggcttcaagcatgtagttcaatacggccttgcagcagtagaacgtgcccgaaagattgacgtcgatcacgttctgccactgttcgacggtcattttcttgagcgtgctgtcgttggtgatgccggcattgttgatcaggatgtcgatcttgccgaacttgtcggcgacgcgcttggccgcagcggttaccgcctcgaaatcgctcgtatcgaccttgtcgaaggtgatggcgagcccttcggctgcggcttttttctccatttccttaccgcgggcttcgttacgtgcccatacgactacctgtgcgccttcgcgtgcgaaacgcagtgccgttgcttcgccgataccggccgtgccgcccgtgacgatggcgactctgttctcaagtcttttcatggttatttctttttagatgaattctttgttgtgtttgagcttggcggtgcccgtgatgcactctttgccggcagcatcgagcagcaggcatttgatcgtaccgatgtgtttttcggtgtttacgtcgattacttcaaattcggccgtatatttctccccggcgaagacgggtgcacggaacgacatctcctgcgagagatagatggtgccctgtcccgggaagagcatgccgaagaccttcgagaatacggccgccgaaaggaatccgtgcacgatgggacggccgaacggggttttggctgcgaattccggatcgaggtggatcgggtttttgtcgcccgtgatttcggcgaaagcgatcacgccttcctgcgtataggtcacttcgtgacggtatttatctcctgttttgatcatggcgggcctattttttcatgggtttaagatccttggacacgatcaggtgcgcttcggtagcggcctgaacctgttcgacggtgaattcgggattgatttccgtcagcacgatgccttccggggtaatctccatgacgcccatttcggttacgatcatgttcacggagcctttggccgtcagcggcagcgtacatttcttgaggattttgggtgcgcctttggccgtgtgctccatggcaaggatcaccttgtcggcacccgtgagcaggtccatcgcaccgcccatgccgggagctttcttgcccgggatgatccagttggccaggtcgcctttttcatcgacctgcaaggctcccagtaccgaagcgttcacatgaccgccgcggatgatgccgaacgaggtggcgctgtcgaagcacgaggcgccctcgagggccgtgacgaatccgccgccggcattgataaattcggggtcttcctcgcccggtgcgggggtcgggcccataccgagcaggccgttttcgctctgcaggaagatttgaacgccttccggcaggtaatcggggacggccgtcggcagtccgataccgaggttcaccacgtcgccgtctttgagttccatcgccacgcgtttggcgatgatttctctgatctgttccttttccatagatttatgtcgtttttgtctgttcgtcgtactgtcttgaaacggggcggttctggaatccgggaccgtttcctatttgcggtgcattctgcgggccatctcctgggcgatgaacgacgccacgtcgtcggcgtaggtgttcatgccgaagccggcgtcatagcccagctctttggccagttcgtgcgagatgcgcgggccgccgcacgccagaatcactttgtcgcgcagcccttcggcttcgagcatttcgaccagctccgtgaggttcttgatatggatatccttctgggtcaccgtctgcgaaaccagcagggcgtcggccttgagttcgatcgctttggcgatgaactcttcgttggttacctggctgcccatgttgagggcttcgaacatctcgtagcgctccagtccgtagtgacctgcgaagcctttcatgttcataatggcgtcgatacctaccgtatgggcgtccgtgccggtgctggcgccgatcaccacgatcgggcggccgatctgctcgcggatgaagctgtccgtttcggccatgtcccatttggtcgattcgactttcgggacatggatattcgaataatcgaccgtatgggtacagcttccgtagcagttgaagaacgtgtaaccggccgtcagctcccggtggaataccacctgcgggttctcgaagcccatctttttcatcaactgtttggccgcttcgatggcttcgtcgccggcgggcacgggcagtgtgaaactcaactgcgttttgccgtcgttcatcgtgtcgccgtagggctttatctttttcaggtcgagggtctggtcgaaatccctgccttcggttgaatataatcctccactcatagaatcaatatgctaatatagttaaaataaggcgtttggtcgtgcttgcagcatcggaatatcattttttcgctgcggcgcgactgccgtttttcataatctccacgaaggggttgtagtagttgcggcccttgctgctcacgccctccagacccttgccgccgttcatggggcgtttgatgtcggcgaagattcccttctcgagcgccgagaagagtccctctttttcgaggcgttcgagaagtgcggtagctttgtccaaaacctccttggcacgtttgcggatcagtccgccttccttgaactccacttcgtcgccgatgttcttcatgttgttgaagatgtagcgggcgttctcgatggaaaggtagcggtccgacatgaacggggtgtggatggcttcggtcggcatacctaacaactggatgccctgcgaagtccagatgcccaccatgttgaacagtgcgtcctggatatgtccccggaagatgttgccggtcatgaacttcgtcggcggcatgtatttcagcggagccttggggaagatctcgcgggtcatctgcgcctgcgccagctcgtagaggaagccgttttcgagcatcggatccatctcgaaggcgtgtcccagacccatttgctcctcgggcaggccggccagcagggccagttgttcgttgatcaggtcggaagccagcaccgtgtgggcttcctcgaccgcgtcggccgtggtgaggtagttgtcctcgcccgtgttgatgattacgccggcgaagccgttgattacgcgcgacatatattgatcgaccagcgtgcgctgcatgttgatgtcgcggaacagaatgccgtacagggcgtcgttgagcatcacatccagaccttcgagtgcacccattacggcgatctcgggcatgcagagtcccgagcagtagttgcaaaggcggatgtagcggccgacctcttcgcctacttcgtccagagccttgcgcatgatccggaagttctcctgcgtggcgaacgtgccgccgaatccctcggtcgtcgcgccgtagggcacgtagtcgagcagactttggcccgtagtgcggattacggcgatgatgtcggcgccctgtcgggctgcggcctgcgcctgtacgacatcttcgtagatgttacccgtcgctacgattacgtagaggtaggggcgcggcccttcgccgatggtggcgatgtagttttctcgacgctggcggttggctgcgattttggcgatgctggcgtcgatatacggtttcagcgccgcttcgcgctcggctgccgtacatacggccgagcgggtgatgtcgagtttgccggcagcgatctgctcggcgatttgctggggcgtgagtcccgtttcgacgatcgcgttgccgaggaagaacagggcgccttcgcccaatacgtttttctcccgcagctcttccaccaccacgttcggcagcggtaccgcgttggcatccacgccgtcgatgccgatcagacggcacagcgtccgctcgacggctaccgtcgtataaccttccacaaaatcctgcaccccgttggcgatcttgcgcgctacgtcccgggcgtgttccacctggttaaagtctattcctaatttgcttttcatatcgttcatgtaggctgtgccgtacggctgccgtcattggttgtttttgagttcttcgttgcgttcgattcgccggaggatctccgggtcgatgcccagaatacgggcgatccggatcgcttcgtgcggaacttcgtccgtcgtgacctcctcgagtgagtagtctatgaaatcgttgatgtttttcagcgtgatcctctcctccgcgttcgtttccgagaagccttttaccttcagcttgcggcacggagccgcgatgccgttgtagtgggtggttacgagcgaagggacttcgtagtcggccagaaattcgaggacgccgttcacgatcgcccttccttcgaccggattggtcgtgcgggccggttcgtcgatgagagccagcacccgcctgcctgcccggacgcttttggccagttcgtccatccgcatcatctcggccgcgaacgacgagagtccgctgagctggtcctgtccgtcgccgatggagcagtgcacttcgtccacaagggctatttccgccctttcggccgcaatgtaaaatccgaattgcagcatgtactgggccagctcgacgctgtgcagcaacacggttttgcccgacatgttggcgccggtgattaccgtaggtcccgtcgtcaggcggatgttcacgggctggaatcgcttcccggccgcttcgagcgaaatccgcaactcggggttgaacaagcctcggaaggaggtcgtgtcctgcgttatcgcgggacgggtaaggccccagtcgcgggcctgcatcgccttggcgatcaccacatcgagccatcccatccggtcgagtgcctgttgcaacgcttcgtggtatttccgcaattcgacggagagtctctcccgaatgcggtcttcgatttccacgctgcggaaatagagctcctgcacttgagactcgtcggctccggcctgtttgcgtgctttgatctgtttgcgcagggtcgccagctcctccgagtaggcgtcatagacgaagaaatgggggagccggttgccttccggatcgagcagatcgacgaccccgttcagctcgggaagttccgcaagatgcccttgcgaagccagtggtcgaagctcttccgccagcagcgcgaaaaacttcaattcgaacagttcgatgtcgtcgaatacgcagttgccgcccgtgcgttcgatcgttgagcggatgtcgcgcaacagggccagtttgcggcgaatcgtttcggtgcggtcgcgtccctcttcggtttcgagcaggcgcagcaccgaggtgatacggtcgtgttccgccgtgatcgccgactcctcgccgagccatgtcatttcatggagcatacgtcgcccgacggaggaacagatctccattccttcgacgacgcagcgcagtccgctggtatgttgtatggcctctttgagtcgcattcgctttctggttattcgatgcaattttacacgggttcgcgtatttatttcacggccttctgccgtgtcagagcgtttgaccttcctctgactcccctcctcggaggggactttaagatcctcgattctgttcgtgtgagccgtattcgtttctattcgggcattttctttacgtcgtaaaccggtatctgcaacgcctcctgcatcgcttcgcacaactgtcgggagtcgagcaccagccccgacggagccgtcggattgaccgtgacggccagcagccggctgcggtgtaccaccctgatccggtgcccccggcgcaggaaagcgtaaaacgcttcgggcgaggcgaacacccgcgtaaagtcgcggatgatcaactccacttcccgttgttgcgttcgcagcagttggaacagcttgtccgtgacgatgccggtggcgtaaatccgccggccgtgccggaacaggttttctccgctccgttcgagcatcagcaccgagggtaattcgaggtcgatcggttcgccgccgtcgctgacggcccacaccccctgcgtcaggggggcgagccgggtacgcagcgccttttcgatctcttcgatcccgatcagttcgtaaacgtatttcgtcttgcggaccagttcgggaatatttcccgcgacggcagctcccgtggccaggatcatcgcttcggtgaccgctggcgaagccaggctcaaccgcgacagggcgccgtccacgatcgtcgtgcctacgccccgggatttgagcaggtcgatcagggctttcaggcccgccgtgtccgaaggtccggagagcagcaatttgccgctcatcttcgcgcgggccgttatcagccgcccgagcgccgtccgttccaggctcacgtcgaggacctcggccgcgagccgtttttcccggtagtgtttctccgaggtgacgaagatcattccctcgggaatctcgatctcgggcttcgccgtctggcacacctgatcccggctctcgccgtcgattccgaccgaagtcagggcgaaacgctccgcctggccgccgagttgtcccagaatgtagttcagacattcggttttacccgtgttcttctccaggccgacgatggccaggctgccgaaatccgatatgttcgttacgaatcccaatccggtgcgggctggtcttgcagcgttacgttctaaaggttgtggttacgggtcttgcggctcaattcggacggctcgagcgaaagacgtccgccgctcaacaactcggccacgccttccttccgacgtgctttctcgcactcttcgcagtggcattcgtccttgtagtcggttggttccgtataggtcgtgattacgccttcgtagttgcggagtaccacgcggttcggagcctgcgagatgacatagttcggcatgacgggaatcttgccgccgccgcccggagcgtccacgacgaatgtcggaacggcgtaacccgaggtatgtccccggaggttctcgatgatttcgatgcctttcgataccggggtacggaagtgtccgatgcccagcgacaggtcgcagatataaatatagtagggacgcacacgcatcttcaccagttcgtgtacgagctttttcatgatgtgcgtgcagtcgttcacaccgcgcagcaacaccgattggttgcccaggggaataccggcgtcggccagacgtgcgcaggcctgcttcgattcgggggtcacttcgttcggatgattgaagtgggtgttcagccagatcgggtggtatttcttgagcatgttcaccaattccggtgtgatgcgttgaggcagcacgaccggggtgcgcgagccgatgcggatgatctccacgtggggaatggcacgcagacggctgatgatatattcgagtttttcgtcgctcaccagcagggcgtcgccgcccgagagcagcacgtcgcgtacctgcggtgtacgggcgatgtagtcgatgcagtcgtcgatctgtttctcgggggttgcacagtcgtgctggccggcgaagcggcggcgcgtgcagtggcggcagtacatcgagcacatgtcggtaatcaggaacagtacccggtcggggtaacggtgcgtcagacccggtacgggcgaatcactgtcctcatgcagaggatcttccaggtcggcgggcgaacgcttcagctcctcgacggtaggaatggcctgcttgcggatcgggcagtgcggattttccggatcgatcagcgtcaggtagtagggcgtgatggccatgcggagcgttttgagcgattcgcggatgccttcctcctcttcagcggtcagcttgatgtatttcttgagctcatctacggtctcaatcctgttttttacctgccagtgccagtcgttccattgctggtcggtcacttcgggaaagaattcttttctgcggctcattgcgggtgtgagaggtgtcatttgattttatttgtttcgttcgattgttacgttgttgcggtttgtgttttttcgccgatgtagcgagcgtttgttttcgccgtccgctcatcgaaaacggatgcggcggacggctattttcgatgagtgcctccctgcctcggtaagtcggatccgtcctgcttttttaatttgcgccgggcggggacgatgaggaaaggcggcaggtgtcgttcgtattggttaggcgtacagctcggtgaatatttttctgagaggttcgcattcgcggaactcctgaagcgtgatctctgcatgtcccttcgtatagccgtttccgataatcatcgtcacgtcgctgccgacgccttcggcgccgagagcggctttcgtgaagctcgtggccatcgagaagaaatagacgatgcccgtattcttggtacagaggatgctggtcatttcggtgtcgggaacattcacgttgttgatggtgatgtcgcacatttcgccattggtcagctccgtaatcttttcgagtaccggaatcggctgacgagcgtccatgcagacgacctcgtggcagaagcccagcttgtccaggcgctccttctcctcgggactgtaacagagtccgatcactttgcccgttacgccgacccgcttgcgagcctcgtagcagcagagcatgccggatttgccggctgcgccgatgatcagcaccgtgttgccggggcgaaccagtttggctacctgtgccggagctccggccacgtcgagggccgacattaccagcttttcgggcaggtcggaaggtattttggcgtagatgccgctttcgaacaggatcgccttgccgtcgatatcgacctgatcgacatcggggcgaatctccttgatcttgtcgatccgcagcggagtcagcgacagcgaaaccagcgtggcgatcttgtcgcctaccttgaggtcggtcttgccgacgagcgcgtcgccgatcttctcgaccgtgcccagcagcatgccgcccgatccggttaccggattgcggtgtttgccttgtttttcgacgatgtcgagcatgatctcggcgattttggctttgtcgcctccggcctggttcgagatctgggtgaagctggccgagtcgatgttgagggtctgtacgtcgatcagaatctcgttgtcgtagatctcgtccatgttgttgtccagcttgtctgccggctggggaagcacgcccttcggggagattacccggtgtgtgccgtatttatgtccttttttcattatggtgttttgttgtgttgcagtgttgatgttttttccgtgatcttatttcttgagtcccagaatgcggcgagcttcgtccggtgtggcgacctcgcgtccgaactctttggccatgcgaacgaccttctcgaccagttcgccgttggatttggccggaacgcctttggagagatagacgttgtcctcgaaacctacgcgcacgtggccgccgtcgatgatcgccagggccgccagcggaaattcgtagcgtcccacgccggctaccgtgtaggtcgcatcggccggaatgctgccccgcaggaagacgaaatcccggatgtcgcctccgatgccgccgttcacacccatcacgaagtcgaaatgcatgggggcggcgatatagcccttcttgtgcaggcggagcgccatttcgatcatactcttgtcgaagacctccagctcgggtttgatgccccgctcgatcatcttctggccgaagtacttgatcgtgttctccgtgttctcgaagatttcatcgccgccgaaattgagcgtgccgcagtcgagggtcgccatttcggggagcagctccgtaggttgcagccgttcgtcgttggtcatgccgacggcacctcccgtcgaaggctggatgattacgtccgggcaaaccgcacggatagcgtccataacctgtttgaagcggtttttatcctgcgtgggttggccgtcgtcgttgcgcacgtgcaggtggatgatgctcgcgccggcatcgtaggccgacttggcctcccgggcgcactcttccaccgtgtaggggactgcggggttgtgttccttgagtacttccgctccgcagatcgcggccgttatgatcagtttttccatggggtctttggttgaaaagtttgaaaatggttgaattccgttgctttgtccgatgtggcggctaaacctgttcggacctgttcgccgagaatttccggccgcatcggccgttttctctctccggcgctcctgcctgcggtcttcgcatcgcgggacgctttcgtgtccggaacgggccgaaaactccgttagcggctttcagggatgcgctggtcctctttttttacgacgcacgtaccgctggcacggcagaccacgacgggctctttgagtacgtcggccgcagagggcgagatgtcggggcgtgcagcgaccactttgcgggcttcgaagaccatcttgcgcgaggtgttgcccaccttcacgatttcgcccaccgcttcgatataatcgccggcatagaccggggcgagaaattcgacgttgtcgtaggccacgaacagtccttcgtcgccgtcgtgcatgatcaacagttcggtggccacgtcgccgaacagatgcaccatatgggcgccgtccaccagattgcctccgtaatgagcgtctttggcactcatccgaagccgtatcattgatttttccataacctgatatttttaattcgattgagatgcggatttgttctttcggccgttcggttatttggccggagcgaccatgtaatctacgaagatacccggcgtgcggaccgcttcgggggctatcgctccggtttctaccagctcccgcacctcggcgatcaccaggtcggctgcggtggccatcaacgggttgaaattctgtgacgtgcctttatagaccaggttgcccgatcggtcggccaggctcgcgccgagcagggctacgtcggcccgcagcggtttttcgagcaggtaatccttgccatcgacgttgatgatttgtttgccttcggctacgatcgttccgagtccgaccggagtgagcacaccgcccagacctgccccgcccgaacgaacccgttcggccagcgttccctgcgggcagaattcgatctccagttcgccgctgttcatctgctcgctggtgcaggggttggtgccgatgtgcgatacgatcactttgcggacctgcttcccggcgatcagccgtccgcagcctttgtccggataagccgtatcgttcacgatgagggtgaggtcctttacgcccgattcaaccagtgcgtcgatgatcgcgtgggggcttccgttgcccagaaagccgccgatcatgaccgtcattccgtcttttaccattcccgccgcttcggcagcagatataagcttcttcatatggtgattgattttacttaaaattaacaatatcagtctttaatctaacaaaattaaacatttgacgaatgatttgcaatgatttcgacgtttttttgtcgattttgtcgataatcggtcacttcttctccgaaagagtggaatcttcggatccgatcgcgcggaagcgggtgttcggaaggacctgaaaaagtacggccggacgcctcgaggcgtccggccgtactttctgcggaacggttctttgcgggatcagagaagtcggcagtgcaaacgttcgggcagcggtgcgctgttgtcgcggcgccagaccatggcccgatcctgttcctggttgcccgagccgaagtcgaagtcgtccggcgcttcgaaaacgaccggaagcgaccggtcttcgaagccgaacggagcgtaaaagtccttgaggctttcctggctcgggataaggatcgcggcgtcggccccttcttctgcgatccgccgcattgcctcgcgcatcaatccggaggccaggccccggccccggtagtcggggtcggtcgccacgccgtagatgtaggtcgtgcgccccagctcgctttcgaacgggatcaggtgcagcatggccgccagacggccgtcctcttcggctgcgagcatccgcttgcggctgtaatggccgatcaggaaggagtcgatgaaggtttcttcgtcttcgaagcactttatccagagccgtttgcaggctatttcgtcggggtagaggcagagggccgtatatttcttctcgaggaatgccggatggtaggagagcttggcctgccgtagtcccggaatacccaggtcctcttcgcggtcgatgagcgtgtattgctcgggcaggtgcgccacgaactcccggttgatgatggtgaaagccccgtcgtattcggtgtcggccttttcgacatgaacacagaacgtatggtcgttgatcggtgagccgtaagtgaaagcgacgagtttatcaccgacgtagatgcagccgccgataagtcccagccggtcgaaatgggcgaaagcccgctgcatggcccgctgttcggccgacagctcgcccgtatgtccgctgcgggtcttgcgccattcggcttccagacgcatgcactccgcagcatggtcgcgggtcataggctcgtagcggtattcgtattccgcctcgaagcggttgatgtggttgcgtttggattggtatttccggcccggaaggtcgcgcagatccgaagcgttgtacacatagtcttccagattgcggtcggaggcgaaagcgaactggcagtggcctacactgcggagtttttcgagcccttcaggtgtcatgtcgatgatccgaagccgttgtccggcagcgagtatatcctcctccagatgccgcaggacgggggtgaaatctcctgcgccgacaggctgcatgtagccgatccggtcgctgcccccgatctggaagcggatgaccagaaagccgtccactacgctccaggcggttttgaactggaattgccagcaaaacatgttggcgaacgccaggtcgcagttcgccggggcgtaaggcaatgtgaaggattcgatttcggccttgtcttcgatcgtaatgggtttgaaggtaatcataaattgtcttctacggtgtaatttttggcttccacatgcccgtaatactgttgaatcagggccttgagccgattttcgaccgacgcggtctgttcccggtccgaagtcccgtttcggaacgtcgcgccggtcatccgctcctcgtcgaacgagaagagcgcttcgtccgttacgacccggaattccgaatcgtacatcacggcccacggttcgcggtcgggttcgttcagaatgtcgcgtccgaatgcgaaatagggttcccggtttcccaacagtcccagcagggtcggcatgatgtcgatttgctgcacggtctgtgccagaaattgcggcgcgagtgcgccgtcgggggtgtggatgaatccgacgatgtggtagttaccgggataggagcgagtttcctccgccattttctccgaggaaacgtggtccgcgacgaagacgaagatcgttcgttggaaccactcttcgtgctcgaacctgcggtagaaattccggaaagcgaggtcttcgtaagctgccggtttatggattttggtcgttccttcgggcagcacgttgcgatattgttcgggcacgacgaagggatggtgcgacgagagggtgaacagcgtggcgaagaatggttcctgcattttcgagagttcttcgcccgtgaattgcaggaacggttcgtcccagatgccccagtaaccgtcgaaatccccggtgccgtgtaccgcttcgtaatcctcgcggctcaggagccgctcgatgctggcgctgcgggcgtaggctccgaatcccatcgaaccgcgctccgaaccgcagaagaaggcggttcggtagcctttgtcgcggagtatctgcggcagttggcggcttttgcccagcgactggggcatcaacacgaaaggttgtttgaaggaggggatgctgcccaatacggcgggcatggcctggatcgagcgggtgccgttggcgtacatctgcccgaaacagaggctctgccgcatgagcgagtcgaggaacggcgtatagcccggttgcgtgccgttgccgtacaattcgggtttgaggtaggccgaatgttcggccgacatgctttccagaatgaaaaccatcacgttgcgcccttcgaggttcacggccgaagagtcggggcggtgggtcggggtgaaatattcgtccagtttttcgggcgaaaagtagcgggtgtatttgaccgatccgccgctgccgatggtccgcagaatgcagaaggggttgctcaggatcaggttggccttttcgctggtcgaggcgtagagcgtggcgttcgagagggtgatcgggcgggtcatgcgcgttacgccgccccgcatgccggcgatgccgagcagaatggcgatcaccagcagtcctgtattgaccgagtgataaacccagccctcgcgcaggggcgatcggggtgtgatcttgcgtccgtaaccccaaacgagcagccagatgaggactgcgccgacgaggagcaggtaccagttttcggcggcgaatttcagcacgagctgcaccgaattggagttgtcggcgaagaagatttcgtcggcggtgaaacgcttctgcgtatagcggaaatagacgcaatcggccaggtttacggccacgatcagcagcgaattgatcaccgcatagtaccagaagagaatacgccgataccagctccgctcccggaaatggaacggcagcagcgagaggacgatgaaaagcagattggcgtagagaaccgatacggtgtcgaacttcagacccccccccgccaatgtcaggacctcctgccaacccagggggccgatcagggcgtagttgtagcagtaaaagacgattcggcagagcagcaggacgatgtagagcaggacgatgcgccgcaggagcatgctcggattactatgtagccagcgttccaccttagcaggcttttaacgacatgtcgagcgatttgatctggtgcgtcagggcgccgaccgatatgaagtccacgcctgtttcggcgtattcgcgcagcgtgtcgagcgtgatgccgccgctcgactccgtttcgcagcgtccggcgaccttcgcgacggcctgccgcgtcagctccggggtgaaattgtcgaacatgatgcggtccacgcctcctgcggcgaacacttcgtcgatgtcttcgagcgaacgcacttcgcattcgatcggaatgttcttgccttttgccttgagataggctttggctccttcgatggccgggcggatgccgcctgcaaagtctatgtggttgtccttcagcagaatcatgtcgaacagtcccatgcggtgattctcaccgccgccgatcttgacggccatcttgtccaatacgcgcatgcccggggtggttttgcgcgtgtcgagaactttggtatgcaggtctttgatcttgtcggcatagacggctgtctgggtcgccacgccgctcatgcgctgcatgatgttcagcaggatgcgttcggcttgcagcagggactggagccgtcccgaaacgtagaaggccacgtcgcccggcttcacgcggtcgccgtcgcggaggatctgttcgaattgcatctcggggtccaggcgtcgaagtaccagttgtgcgatttcgatgcccgcgagaataccctcctgtttgcagagcaggcgcatgcggcctttttccgtcgcggggatgcagcagagcgaagtgtggtcgccgtcgccgatgtcttcgcggatggccagttcgatgagcgcatcgacgaaaggtttgtattcgggtttcatattttttcggtttttatgggtgaaacgaatcgtttcgttcggcagggccggacgaatgtctgaagagagaacggtaaccgtgcgtttggcccgcaaagattaccgctccgctccggcacccacaaaaatactgaaaatctctggaataacctcgaaaaacgggagaaatgacgctaaacgacttaatatcagagttgttacgatgtcaaatgatgacaagccgaaaaatcggaaaacgcaaagaaaagcggatttaagaagaagaatggtttgcaaatcattacccgtaaaagagtaagatttaacatatgagagatgctattgcaccgtttgtcaccgatttgcgtatcaaggtctaactcgttgatatttaactttgcaaacaattgtttgcaaagttaaatatcaacgagttagaccttgatacgcaaatcggtgacaaacggtgcaatagcatctctcatatatgttaaatattactctttcacgggtaatgatttagtaacgaaacaacgtccattatccgcattttttgtgctgaaactaactgattatagattttgacaaacaaacaaaatactgataatcacgtaaattcaacactctttttccctccttaaaaatggatgcaaccaatgacatcaccgtctttttttacgacaatataacctccattggcattgaaacaaccatcccacggagaagacactgtcatgccgagagcgaaagctaaaaggaactgcttgattttgtacgcatacattggctgtccttccggactattgatgtgtaagggatcatcttgcgcaactttctgggttgcgactgaaacttcacttccttgacctgaataatatttatccatacattcagcgatgatacgagccatgcccaaatcaagcatagtaagattatttctgagagtttcgcccgaaatttttgaaacaattttatttttcgataatcaggcgtccctgatagcttacatcgaaagcgccggcgcaggtgaaggtaaccgtcagctcggtccttgcggcctcgcccgtgaggttggtgattacgtatttggcgaagggcgtgcccttgatttccggtgtgaccgaggcggcgctcaagtcaatggttttttcctcgcctgtgtaggaaatacccggtacttccatttcgagggcgggcatttcggcggcgaagcgggtttcgtgcatcaggattcgcaccttgccttcgccgtcggcaaccagttcgaagagagctttcccgtcggtgaacgtggcgcccgaggcgaccgtcgtgacggtcgaggtgccgaagaaaagcatgttggccgtgacggttccgtcgttgatcgaggtgttttccgtggcatacgtatacccgtcggggagttccggggtaggatcgggatcgccggtgcagccatccgagcaactgctcaaagcagccgaggcgagcagggagaaggggaggagaaacgtgaagaattttttcatagtatggaattttatagggtgatgctcaatgaaacgccgaaagtgcgtggccggccccgctgcaggaacgagttgccgatcgacatgaaatagaatgtatcgtagcgggtgtcggtcaggttgcgtccccagacatcgacggcccagtggcggtgttcgaagcgaatcgaggcttccagcagggcgtagaagggttgcgagaaggtgttcgcttcgttccagtagattcggcccgcaccgttggcagccactcggaagatgacgtattcgagccagttccagcccgtgcggagcgtataggacgctccggcgtagagcgtgtgctgcggggcgtaggggatgaagttgccagcgtagtcggctttgcccgtatcgaatttgacgaacgtggcgcgggtgtagccgtaggcgacttgcaggtcgaggtttcgccagagggtagccagcagcgacgcttcgccgccgaagctgcgcgtgcggccggcgttagtcatcagacggcccgtgacctgtccttcggggaagaccgtgagctgctggtcgcggcagtcgatgtagaagagcgccagatcggcctgcaccttgtgcgaaggggtcgagaggtgggcacccacctcgtagttccagcttttctcgggtttgtaggtcaccacgtcggccacgtcgtagagcgagccgaatcccatctgtttcatcacttgctgctgcaggacatccgagaacatctgggtattgaatccgccggccttgtagcctttgctgacggtggcgtagagcgtgttacgccgtgagctgcccatccggtagagcaccgatattttgggaagtatctccgtgaaggattgtttgagcgtacccggctgatcgaccagaatagcatggggatagctcgtgccgtcgggtgtttgggtcgtgtaggtggcttcggcatagcttcggtagtggagcttcgaagcctcgaaatcaacgcgcaggcctgccgtgaagcgccatcggccggcgtcgtaggtggattcgtggtagagggccgctccgtagtcgggcgtgcggaagcggctgtcgagcaggaacgtatcttcgccccattcggcgtgaatcccctgcggttcgaaacgatcgaggatcaggttgcggatgccgtcctccttgaagagcaccggtgcgtgcatggtggtatggcggtagaagccgaaggcaccgaggagccagcggtaggctttgtcgtcgggggagcggaacacgaggtcttcggtcacggcgtgctcccggcgggcctgtgtcagtgtaaaataggagagcggcaggaaatcctggtcgaggttcatccggtcgtcgaggtactgatagctggtgatgctcgctacggagaatttctctccttcgtagcggatcgtcagtccgtcgttgaagttcgtgcggcggtaatcgctcgggtcgttgtaagcgatctggccggtttcggcataggcgtaagggtagccgccctgttccagcttgacgaacgagaaggtgttgtcgatacgaagtccgtgcaggttgcggtactgtaccttgaaccggccgccgccgcttctctcccagtcgcatttttcaccggtatagaggttcttgaagaagccgtcggtcttggaatagtaggctccgaccgagaagccgacccgttcgctggttttgtagtaggtcgaaatccggtatttctgcgtgttgccgctgccgtactccatgcccagccgcactccttcgaaggtgaagggcgacagggtatagacgtttattacgccgcccatcgtgttgcgtccgaacagcgtgctctgggggccgcgcagcacttcgatccgctcgatgtccgtcaaatcgaagtcgtaggcgtccttgttcaggtaggggatgttgtcgatgttgagccccatcaccggttggtcgatgcgggcgcccagtccccggatgtagatcgaagaggtcatgcgcgagccgtagtccgggatgtggaagttgggaaccacctgcgaaacctctttcagggctgcgacgtgccgccgttccaggtccgtgcgtccgattacggaagccgttacgggttggttgcgcaggttgaggccctgtttgatggccgtgacctggatgtcctccacctggataacggagtccgccagtgccggagtggagtcttccggcagcgcgggggcggcacatacgctcatggcgtgcaggagtatgcacgccgacagaaagatgatatggatcgcctggcggatcatcggatcgtttcgaacggcaaaaacggcgcagaccgtagagtccgtcggttttctccgatttcgccggagcgccgcgttcgcttttaccgcgattgttcggggacaaaggaacgatattccgatcgtttttgcaaccctcatttatgaggagtgcggatgtcgctttcgtccacgtagcccatgctgacggcgcagatgacgagtgcggcgacggactgtacgccgagcttctgcatgatgttgcggcggtgggagatgacggtcgtgagcccgatttgcagccggtcggcgatctgtttgttcagcaaaccctgagcgatgagcgtcagcacttccgtttcgcgtacggagagcaggttggcggccggagcgccgttctgtcggggaagggcatggtcgggtcggggcgcttcgctgcgcaggcacagcagatcgtgtaccagtcgttcttcgccgccgaagatatcgatctggcgcattcgggcgaactgggccgaataccctttgcccagcaggatcgtcttgtgactgttttccaggaagaaggtgcggtggcgcatgaaaacctgcatggcggcgaaatagtggaaatagcgttccggtccggaagcgatgaattcggtgaagctgtcgaacacggcgatctctcccggaggacctaccttttcgagaatcgtccgcaggcccaacccgatcaggatgttgggcgtaatgacggcgatggccggttttgtcgggggacagctcattcgtggtggtagggttcgttgttcaggatggtgaaagcccgatatatctgttcggcgaagatggctcgcacgatctggtgcgagaaggtcatcttcgagagcgacagtttggtatcggcccgtgcatatacctcgtcggagaatccgtaggggccgccgatgaccatgaccagccgccggatgccgctcgccatgcgtttttgcagccagtaggcgaagtcgatcgaacggtattcgtcgccccgttcgtcgagcagcaccacgtaatccccgtcgccgaactgacgcaggaggctggcgccctcggtcgtgcgctgctgtttggccgagaggttcttggtgttttttacgtcgggcaggactgtgacggcgaaacggcaatagaaattgattcgccgggcatacatggccagcagcgattcgatctccttggagtccgtttttccgattacgatcagttcgatgttcacgttggttggtttatggtcgtcctgccggcggcttttggcggcggaacggcgagaggttgtttctgcgtccggcgattcgccaacaggcatgacggtttccggccgaatgtgcggccggggtacgttacggttttcaggggactatttccaggtccgtattccactctccgtcggcatcgatgcagattacgggacgcgaaggttccacggacttgagccactgataggctttgtacatattatatccgttgcccgactctccgcccagagcgaatccgatgatgcaggtgtggttgcgggagcggtagtacatgttccgcacgcgttcgaggtattcgtccgcaagacgcggatcgttgctcggtgtgccgcctgtggtgcggtcgtcgcgcttttccggagcgttgatattggcctgatcgatcacgaagaggcccagttcgtcgcacagattgtagaaccagtagggttgaggcgcattgggccagatggtattgatcccttttttcttgagcgccagcagttctttgcgcgtggcagcggcgtccgctgccgcgttgtatctttcggaaacgatagtgacaggtttgtcgaaacgggtaatcttcccgtctttcatctccgtctttccgaatcctactttgagggggatgtactccttgaagactcccttgcgtttggtgtagagcatgacccggtatagcggggcggcgcctttggctccccagctattttcgtaggtgtgataaatgtagggcgagaagcgtaccgtgtcgagcgagcgtccgggaacggttatgtcgtttacgctgaaatcgagcagcttgccgttgggggcgtaaatgtcgaacccgacggtgatcggttcctcgtagttgtagccgttctgcacgatcacctccaggtcgagcacgccgaatttgcgggtcgaatcggggatcagcgctacgttgaaatcgcgtatgctgcgtttctcctgggcgaaaagataactgttggtaaacggttttaccggggtcggagtgaaacctttttgcaattcgggcgtattactttcgtgcagttccagtaaaatgaggttatcgccctgtttgacgtagggggtaaggtcgaagtcggccggagcgaaagggtcttcgaccacggctacggtgcggtcattgacgcggagcgtgtaggccgtgcccgtgttttcgagatggaggtagatgaacgagtcgaaccaaccgttcggaagattgaccacattcccgattccgagcacctcttccccgtcgttcagaagttcgggggcgaaaaccaggtatttgtcggtgtttttccggttgagcgcatcggcgtcttcgcgggtgtcgaacgggacgaattcggaacggtggatgcgtcccccgtcttgtccgtaaacggccccggtgtaacacaggacggcgattgcgaggaaaattcgtttcatggcggaattgtactataatgcgattgacaaaggtactttttttttgacaaatcacaaatatatcctatctttgtctatctttaagaatgagtaaaaacaagaagaaattaccgaacgtatgaaaagcttgagaatcgcagaattgctgcagtcgccggcgacggacgccgaggtcgttgtgaaaggttgggtcagaaccaaacgtggaaataagaacgtggctttcatcgccctgaacgacggatcgtgtgtggcgaatatgcaggttgtggtcgatctggcgaaattcgacgaggagctgctccgtaaggtgactaccggagcctgtctgcgtgtggacggacgcctggtcgcttcgtgcggtgcgggacagggcgtcgaggtgcaggccgagaagatcgagatatacggtacggcggatcccgaaacctatcctttgcagaagaagggacattcgctcgaattcctgcgcgacatcgcttatctgcgtccccgtaccaacacgttcggtgcgatttttcgcatccgtcacgcgatggcctatgcgatacataaatattttaacgacaaaggtttctattacctgcatacgccgctgatcaccgcttcggactgcgaaggcgccggggcgatgttccaggtgacgacgctcgatctgaacaacctgcccaaaaccgaagagggggccgtggactattcgcaggactttttcggccgtccgtgcagcctgaccgtgtccggccagctcgaaggcgagttgggagctttgtcgctggggcagatctatactttcggcccgacgttccgtgccgaaaactccaatacgccgcgccacctctccgagttctggatgatcgagccggaaatggccttttacgagctggaggacaacatggagctggccgaggatttcctgaaatacctgatccgctacgcgttggagaactgccgcgaggatctggagttcatgaacaagatgtgggacaacggtttgatcgagcggctcaacttcgtgttgaaccacgaattcaagcggctggattataccgagggcgtggagattctcaaggcttcgggccgcaagttcgaattcccctgcgactgggggtgcgacttgcagtcggaacacgaacgctatctggtcgaggagcacttcaagcgtccggtgatccttatcaactatccgaagcagatcaaggctttctacatgaagcagaacgaggatggaaagaccgtccgtgcgatggacgtgctgttcccgaagatcggcgagattatcggcggttcggagcgcgaggccgactacgaaaaactttcggcccgtgtacacgaactgggtatgaacgagaaagaactctggtggtatctcgacacccgtcgttggggatcggctcctcattccggtttcggactcgggttcgagcgcctgctgctcttcgtgacgggtatgggtaacatccgcgatgtgattcccttcccccgtacgcccaagaatgcggaattttaattaaatccggaccatttatctattaacccgttttcagccgttcctgataatacttttatcacgaactgcaatattttattttgccaaaagaagaagccgattactaatttcgaagttaataattgggaggagacaagtatgagcatgatcaatcaaaagcaggtattgtccctgcaacagaaattatcaccccagcagattcagatgatcaaattgttggagttgccgaccatgcagctcgagcagcggatcaagcaggagatcgaggagaacatcgtgttggaggaagacgatcatactccggaggacgagcagccgcagcagatttcggtggaggaatacctccgggaagacgaaactccttcctataagagccgtatcaacaactattcgaaagacgataaaccgcgccaggccccccttgcgggcggacgttcgttgcaggagtacctggtcgaacagttgggataccgcaatctctcggagcaggatatgcgtctggccgtttatctggtcggcagtatcgaggaggacggctatctgcgccggagtttggaggctatcgccgacgacatcgccttcacgcagggcgtagatgtttcggtcgagcacttggaacgattgctgtcgattatccacgaactcgaaccgaccggtgtaggtgcccgtaacctgcaggagtgtttgttgttgcaattggatcaggagaatcttaatacccgctcccgccggctggcccgcaagatcgtggagtgctatttcgacgagtttgtcaaaaagcattacgaaaaactgatggcccggcttcaggtttccgaggacgaattccgcgaggcgatcgaagagattacccgcctttcacccaaaccgggcaacctttactccgaaggcggggccgatacgacgccttacgtgacgccggatttcatcctcgattaccacgaagggcatttcgacctgacgctcaattcgggtaatcttcccgaagcgagaatcaatcatcgttatatcgaaatgatgcggggcatggtggattccgacggtcgggtcaaggagaaggaccgcgaggcgattcagttcgtcaagagcaagatcgattcggccaagtggttcatttcggcgatcaagcagcggcacgatacgctgatgcggacgatgcaggagattctcgattaccagcaggaatatttcaaggacggtaacaaaagtaagttgcggccgatgatcctcaaggatatcgccgatcgcacggggttggacgtatcgaccatttcgcgcgtggtgaacagcaaatatgtacagacccagttcggcatcattctgctcaagtcgctcttctcggaggcgatgcagaccgacagcggcgaggaagtgtcgagctatgaaatcaagaatatcctccagcagtgcatcgacgaggaggataaacgcaagcctctgaccgatgaaacattgatggatatcctcaattcgaaggggtaccgcatcgcacgtcgtacggtggccaagtatcgggagatgttgagtattccggtggcacggctccgtaaacagatttaatcgcgtagaagatgtatttgcgtttgtcgaaggctgtttccgttgtgctgcatccgttcctggtgccgctctatatggtgtcgctgctattgctggccggtacggtctattcgctttatccgctcaaggtcaagatataccttatttgggtgacgctgctttttacgacgatcattccggttttggtgatcgcactgctcaagtcgtatcgtaagatcggcgatgcggatttgagcgaccgcaaggaacgcttcatcccgctgctcgctatgatcgcctgctatacgttgtgcgccgtcgccattgcgaggattccttcggcgcagatgttgagccgttttatgtttgcgggagcctgttgtgtcgccgtgtgtctttttgtcagcttttattggaagatcagcctgcatatgacggcgttgggtgctgccgtggcttttatcgttctgatcaatatcgccagcggcgggggactcttcgctgcgtttatcgcagccctgctcgctgccggtgcgctcggctccgcccggctgaaactggggtatcatacgctgtcgcaagtggcggtgggattcgcaactggttttatcgtcgccgcaggcgtcggtttgttcaactggtaatatctatgaaaaataaggcagtgtgtctttatgacacactgctgttttattatcgggatgcggcaaagtcatttacgatagtaaattcctgtcgctcttacccgcaaatgccttgtcttgcatccattctgacattccttattcaggggttgtgcctgaaattttcatttcgacacagccccgttttaatattacgggttgctattttttcaactgtccgcccagcatgatgccgggataattttgcatgacggaggcgatttgctgcattttctcgttcgcagcgtattccggagaggagtgccgcacggcttcgagcgcatcgcctgcatcgaactggagcgtcagcacctcgccgcgcagggagagatagccttgaaaggtggcttgtttcccgtcttggatcagcgtgatggcggctgttccggtggcgggatcgtagctatacgtcccgtcgatctcatgtccgcccatagaggcgtggagccggttgcgttttttgaaggaaacggtcccctgtcccggcacgaggcctgccttgacgtaatgggtcgccaactggtcttgcaatccggctacggcgatcgaggcgaacatatcgtcgcccttgtattcgatgctgggagcctggtaggtccagactccgaggagcgcttcttccgacggataggtcggcggtgtggcctcttcctgtttcgcggagtgactacctcctaaaagttgctggagtttttcattcatcgattgtcccgaaacagcgattgtcgcgcatacgacgaacagggcggacagacataatgtacgtttcatatccgaatggtttttatttttcctgaatcagaagatcgatttcccgcaaccacaggcttgccgtagcgtccgaaggcatacgccagtcgccgcgcggcgagagggagatgatgcctactttcggaccgtcgggcatggccgagcgtttgaactgctgcgagaagaatcgctggaagaatacccgcatccagcgcaggatcgtcgcccggtcgtagcgtccgtcgaacgctttttccgcagcgaagagaatcttggcgggggagtaaccgttctggatgaagtggtagaggaaaaagtcgtgcaactcgtagggccctaccagcttctcggtgtgctgggcgattcctccttcttcgctggatggcagcagctcggggctgatcggcgtggcgactacatcgagcagaatctcgcggatcgcatcgtcctgacatacctgggccatccatcgtagaagcacctggatcagggttttgggcagcgaggcgttcagaccgtacatcgacatctggtcgccattgtaggtcgcccagcccagtgccagttcgctcaggtcgcccgtgccgaggaccatgccgtgctccatgttggcgatgtccatcaggatttgtgtccgctcccgggcctgggcgttttcgtaggcggaagattgttcttcggggttgagtccgatatcggcgaagtgttgttcgcaggctttgcggatggaaatttcgcgggaagtgatgcccaggcagcgcatcagggcgatcgagttgcggtaggtgcggttgctggtgccgaatccgggcattgtgacgccgatgatgcctttgcggtcgagcccgaggcgatcgaaagtccgcacggcgatcagcagggccagtgtggagtccaagccgccggaaaccccgatgacgacctttttgcaatcggtatgctgcaggcgctgggccagccccatcgtctgaatgttgatgatttcacgacccgattcgtccatctcttcgggcgtttgcggcacgaaaggatgggaactgaactcccggtcgagggtgacgttcgcggggttttccggcaggggaatttcgacgatgatgcgctcggcgggacggtgcggcgcgaaagtcgtggtgcggcggcgcgagttgaggagcttttcggtgtctatgtctgcgacgatcaactgttcctcggtcgaaaaccgttcggtgcgccgcagcatccggccgctctcgacgatcaggccgttgccgccgaataccaggtcggtcgaagattctccgtagccggctgaacagtagatgtaggccgactgggtccgggccgattgcgatttgaccagcgtgagcaggtagttgtgcttgcccagcacttcgggcgatgccgagaggttgaaaagtatctgggcgccgtccactgcctgatgcagcgacggggcggccggaacccacatatcctcgcagatttccacgccgaacttcacgcctccgatgttgaaaagcatgttgcggccgaagtcggtatcctggccgcacatccggatcgtggccaggccgatctcttcgcccgacatgaagcagcgggcctcgtaaaattccgagtaattgggaatatatgtcttggggaccacgccgtgaatacgtccctgagcgaaaactaccgcgcagttgtagagggcattgccgtaagtgacgggcataccgacgatggcgacgatgggcagttcgcgggtctgggcgaggatatagcccaaggcctgttccgccgcatggagcaaggcgggttgctggatcagatcgccgcaggtataggaggtgatgcagagttccgggaagaggatgatgctcgctccccggtcggcgcccttgcggatcaattcggtgatatgttgggcgttatagtcgcaatcggcgatccgtacatggggaactgccgccgctactttcagaaaaccaaatctgttcatacgatttttgccggtttatttttttcgttttctgtcccgaagcgtatcgaacatcttcgtacggtccgggtatcggaaaaactctcggtttgtttttttgcgtttttttcgctcggcatggtccgaacggattcggcttcgtgtccgcctgtcgaaaacgcttgttgtgcaatatttttattttgtccagagctgggccaggttcaggattacctgcatggctttgtgcatggtcgtcagcgagcaatattcgtaacggccgtggaaattcatgccgccggtgaagatgttggggcaggggagtcccatgaaggagagccgtgcgccgtccgtgccgcctcggatgggcttcacgagcggttcgacccccgccattttcatcgcctcgatcgccttgtcgatcacctgcgggtgcggttcgaccatcttgcgcatgttgtagtacgaatccttgagcgtgagggtcagcaccccttcgccgtatttgcggacgagcagatcgacgcactcctgcatgtagttcttgcgggcttcgaaacgggcgctgtcgtggtcgcggacgatgtagctgatctgcgcctgatcgaccgtaccgttgagggcgatacagtggtagaagccgtcgtagccttcggtgtgttcgggtcgctcccaggccggcagtagggcgttcagctcgcatgctacctgaatggcgttgatcatcttgtctttggcgtagcccgggtggacgttgcggccctggatctcgatcttggcgctcgcggcgttgaagttctcgtattcgagttccccctcgaagccgccgtccatcgtgtaggcgaagtcggcgccgaaggccttgacgtcgaagaagtccacgccccggccgatctcttcgtcgggggtgaagccgatgcggatcttaccgtgccggagctccggatgtgcgagcagatattccgcagcggtcatgatctccgccacgcccgccttgtcgtcggcgcccagcagcgtcgtgccgtccgtgtggatcagcgtatgtcccttgaagaagctcagctccggaaagtccgcgactttcatcgtcacgccggcgttcagccggatgtccttgccgtcgtaattctctatgacgtgcggtttcacgtcggcgccgctcatatcgggtgcggtgtccacgtgggcgatgaatccgatgacgggggctttttcgcagccgggcgtcgcggggatcgtacccatggcgtagccgtacttgtccaccgtgacctcggtgaggcccagggccttcatctcttcggccagataatcgagcagcacccgctgtttcgcggtcgaggggaaagtttcgctcgactcgtcgctctgggtgtcgaacgaaacgtatttcagaaatctgtctttgagttccatagtatatatcgttgattttttattcttcctttttagcgcggagcgaatgtacggcgaaatagatgataagcgccagatacatgcccagacctacccacgaggctgcgttcgaactgttccactgcgtgagtttccagtccacgtcggcgaatttcaggatcgctcccactacgcccatcagggcgccgcctgcgatgaagcccgacgcgatgagcgtaccctggctcatacgtgccttgttgagcgcctgatctttcgatcgggtcgatacgaaccaggcgatcagaccgccgatcagcagcggaagattgagctgcaggggcaggaacatgcccagtgcgaatggaagggccggaataccgatgccggtgagtaccagcgcgaggactgcgccgcagaaatagagtacccagggagccgttccgccctgcatcaggggttggatcacggcggccatggcattggcctgcggagcttccagcgggctgccggggccgaagccgtaggttttgttcagaataatcatcacgcctgcgacggtggcggccgaaacgaagacgccgaggaatttccagctctcctgttttttcggcgtggtgccgatccagtagccgatcttcaggtcggtgatgaagccgccggcggtcgagagggccgtgcagaccacgccgccgatgatcagtgcggcggtcatgccggccgtaccgttcaggccgatgcttacgagtaccagcgacgcgaggatcagcgtcatgagggtcatacccgaaacggggttgctgccgacgatggcgatggcgttggctgcgaccgtcgtgaaaaggaacgagatgacgaagacgattagtagcgccacggccgtctgcccccagttgcccagaatgccgaactggaaaaagaagaaggtggtggcgagcgccgcgatcaacgtagtgagaatcgtgcgcatggtcaggtcgcgctgggtgcgcggtacgttcgtttcggcttttttcttgcccgaaaactcgctgacggcgagccccatcgcctgtttgatgatgccgctctgacggatgatgccgataagcccggccatggcgattccgccgatacccagcggacgaccgaaggtctggtacagctcttcgggggacatgcctgcgcccgtggcggtcgaaccgaccaccggaacgacgagcagccagatcaggaacgaaccggcggcgatgatggccgaatatttcagtccgatgatgtaacccaggccgagcaccgcagcactcgtattgactttgagcagggttttgaacttatcggcgcagagggtgccccaagccgtcatgcgggtcgagatctcttccgtccagaggccgaaggtactcgctgcgaagtcgtacagaccgcccaccagtccggctacggccagcagcttggcctgattgccgcctttttcgcccgatacgagcacttcggtcgtggccgtcgcctccgggaaggggtacttgccgtgcatctccttgacgaaatatttgcggaaggggatgagcagcacgatgcccaggataccgcccagtaccgacgagaggaatactttgtagaatgcggtttccaaaccgaggatgtagagcgccggcagggtgaagatcgctccggcgacgatgatgcccgacgaggcgccgatcgactgtatgatgacgttctgtcccagcatgttttttttgcccagcatgtttccgacgcctacggcgatgatggcgatcgggatggccgcttcgaatacctggccgatgcgcaggcccagataggctgcggcggcggagaagagaacggccatcagcaggcccatcgtgaccgaatagggtgtgacctccttcggcttggcgtcggccggcatcatcgggacgtactcttcgcccggtttgagttcgcggtacgcgttgtcgggcagagattgagagggtttggtttgttccattgcgtatgtaggttttcgttaaaattccgaggcaacttacaaaagtaggtttttctttcagaaaatcaaacgcaatggctcctaaaaatgcggcaattcgtattgccggggcatttttcggtcccggtcgtcgaaaagatgattatcccccgggcggcatgcgatggcgcggaatccccggggcggggccgacgtttcgccgtgccgacagaaggtcatatccggcggatgaaatccgccatgaccgtcactaacttttcggaaacaggcgcggcagcatccatataaatagtcgttttttgccgttgaggatcggtcacttcgctctgtttcagcaggtgggtcatcccttcgatgatgaccttgtcggcgtcgggccgggcttgggccaaagcttcggcgttgtcggcggatatctggatgtcgttgtcgccattgacgatcaggaccggctgttttacctgccggatcacttcgcgcggatcgtattgcatccacgagatcaggtaaggctgtgcggaaggtcggaagataccttgtaaaatcgcgggaatatcttcggtcgttttcccttgtttgagccgggagaggatagactgcacgttgaggatgagtccgggattgtaggagatcagttcgcgggtgagctggagttgcaggatttcgtcgatcggatagccggctcccgccagcgagatgacggccgcgacgtcgggcgattcggtcgctgcgaccaatgcgacgagcgaaccttcgctgtgcccggcaaggatgatttttcggaagccgcgctccttgaggtaatccgtcagggcttcggcgtcggcgatgtagtcggccaggcgcagccggtcttcctgtttgtaaagttccggatcttggtaacggctgcctccgatgccctgtttgtcgtagcggagcgaggcgattccctctttttcgagcgcacgggcgagcatgtagtaggtgttggttattaggcccgagccgctgttgccgttgcggtcggtcggtcccgagccggcgatgatcagcaccgctgcgtcgcttccttcgtcgggtacggtcagcgttccggagagtttgccccaggaacgggaaaccgagatttcctcctctttggactgggagggaagcgccgcaagcaacagcagtccggcgatgaggtatctgaatgttttcatggtcgctgtgtttgttaatcgaatcgttacaggagatcggcgagcctctccagtccgatgctgtgcgatcctttgaccaggatcagggcctgcgatacgggatgtttccggagctctgcggccagtacttcctgcgacgggtagagagtcgtgtcggcgggtcgggattccaggctgcggtaagccttcgcgaaatgcggtccgaccagcaagatacgggcatcgggaatttcggcggcgagggagatgatatggcggtgttccgcatccgaccagtcgcccagttccagcatatcgccgaggatcagtatcttccgggtgcagccttcgagcggttcctgccggaagttgacgagcgatgcctgcatgctcgagggattggcgttgtaacagtcgagaatcagggtattctgcccggtgcgtattttttgtgagcggtggttgtcgggccgataggagcctacggcatagcggatgcgttcgtcgtccacgccgaaataacgcccgacggcgaccgccgcagcgacattgaagcggttgtagtccccttcgaggtggtgctccacgccgtcggccagcgtggtcgggtaacactccgcagccagcgtttcgcgttcggccgccatggacatcaggaccgggtcgttggcaggaacgaaaacgcgccctccggtccgggcgagccagtcgtacagctcgcctttcccgcgccggacaccctccgggccgccgaagccttccaggtgggctcgtccgatgttggtgacgatgccgtagttgggttccgcgatcgagcagagcagggcgatctccccgcacgcgctcgcacccatctccacgatgccgaactccacgtcgcgggtcattgccaacagggtcagcggtacgccgatgtggttgttcaggttgccccgggtggcatagacttcgtatttctcggccagtacgcggctgaccagctccttcgtggtggttttgccgttgctgcccgtgatggcgaggatcggcagccccaactcccggcggtgttcccgggcgagggcttgcaaggtttgcagcgcgtcgtccacgacgatcagacggtctgccttgtcggggcgggtgttcgggagcgagggatcgtccacgacggcgtatgccgcccccttttcgagggcgtcggctgcgaagcggttgccgtcgaacgacgccccccggagcgcgaagaatacggaatcgggctcgatgcggcgggagtccgtcgaaatgcgcgggtggcgcagatacagttcatacagggatgacatcggggaaatcgaatatttggtcatgttttccttgtccaaaagaagagcggaacgcttgtcgatgggaaacccggcgaggggcatttaccttttcggaaatcccggcggctccggaatcccgcgtcggagcggaaatgttgtggcccttaaatatgtttgtcgccttcgttgtatttcacttcgtcgatgaacttcttgatgttctgttcctcgctgcgcggacagatcagcagcacgtcctccgtatccaccacgatgtactccttcaggccgttgatgacggctactttgccttccgggagggagacgatgcaactgcgggtattttcgtccgtataacatcccttctcgggtttggcgttggcgtaacggtccttgcgggcgtgctggtagagcgagccccaggtccccacgtcgctccagccgaactctccgcggcgtacatagacgttgttcgccttctccatcacgccgtagtcgatcgagatggagcggcattcggagaatactcgggcgatggcttccgcttcttctgaagtgcccaataccggctggatgtccgagaagagggcgtggtgctcgggcaggtaggtgcgcaccgcttcgatgatgtcgccgactttccagacgaagatgccggagttccagagaaattcgccgcattgcaggaacgtctgcgccagctccaggttgggtttttcggtgaaacacttgaccttgctgatggtccggtcgtccgatacctggatatagccgtagcccgtttccggacgggtgggcttgatgccgacggtcatcagagccgcccggtcgtcgatgaagtcgaggcattcgccgatgatggcgcggaaatcctcctcgttgaggatcaggtgatccgccggggtgacgatcatcttcgctcccggatcgcgcttctgcagtccgtaggctgcataacagatgcagggagccgtgttgcgtccgacgggttcgcagagtacctgttccggcccgagttccgggatttgttccagcacgaggtctttgtagcgggcgttggtcacgaccaggaaattttcagccggagccagtttttcgaaacgctcgtacgtcatgcgtataaacgacttgccggtgccgaggatatcgaggaattgcttgggcttggattggcggcttttgggccagaagcggctgccgatgccgccggccatgatgacgcaataggtatgtttgtccatgatgagttgtcgctgcggtttgtttttgaatgatttcagaatttacggccggcatcgccggatcgatccattagacaaagatagctaaaattattctcggatgaaaattaaatattgttcggtatgtttttgaaatgcggatatttgtcggccagggaaattttacggatgatacggacgaatcgtacaacgaactatccggcacttgggaaaaagtgccggatagtggacgtggagtcgagagatgcggtttaccgcagtacgacggtgatcgacatcggaccgtgcgccccgaagaccagggcctgttcgatatctgcggttttcgacggtccggacatgaagcatccgtattcgaagtcgtccaattccggtcgggcgagagcctcgtgcatcgtatcgaccagcgcatcgcgcgggatgaggatcatcagggccgtggcaccgaaatagagggctttgtggcggatatcctgccggatccataccgcgccgttttccgccacaccgaaacaaccgtcgattatgcccaggtcgatatcgatcagcttccgggcgtcgtccaccgtgtcggggttgatagtggcgtgtgcttcgggcaggacggaggcgatggttttggcgtcgggatagtatcggcggatcaactctgtaagggggttcccgtctgccgcgacgacctgcccgccggccgcgatatacagttttgcgatctccagtccgatgccggaagtggccccgaggatgacgattcgattcgtggggataatcgatgaatttttacgattaaatacagtgcgagccgagaagaaaacggtgtatttgcagttttcagggacgtgttcttacgcttttacaaatatagtatgatttgtcggattagggataaatagcatacatattgtatttgtattgaccgttcatacagaaaatagttcgtctggcgaacccgccagacgaactatcaaacattcagttctatataaaattacaaatagaaaggccgcacgtatgacacattgtaagatgatgcgaatggcttgggctcaacaacttctacctcgttcttgactacgtttgcgacaggagtatttgctttaatattcttgtcattgcgtgtaataccggtattcttgccgattataccggacttgggtagtgtaaaagaactcttcgatgtcgcgttgagcttctcaacaagatcgatcaaatcctgaatattacccttgttctctgcggttgcgcgagtgaagagacgaccaaaagtacccgggttgccatcgttatcttctgcataggcaaatgctgtctgcggagtctcccattcaacaacatagaatgagtacggctgtgactgatcgatttccagccaatttgctttcaactgactccaaagggatgcatcagggtattgatcgacatttgtcatttcgtcataccacattagtgcaaatagtttccgtgcgctattgaagccgctatacttgacgacagtgatagctttacctctcgttgcgtctggttgcccaaagatttgaccggcctcgtcgtctcctgaccagtagccgataagctcaatggaaggattaatgttgccgagtttgccggtagttgcgatgttttcaaacttgtgaattttgacaacatggcctgtttcaacagagagcgctgctacaaagccggagcaagctgtttcaggagtcaattctgaagcatcgacagtgaaaacacctttataataatatgtactaagaacttgagcaacagtagtgttaggatcaaacatctgtgacattgcgaacatctcgtcgaaatttgcgtttatatctgcggtaagttggtcaaaatccaaagtcttaaactcttctgttggcatgaatcccaccgtatagtatgtggtagtctcggatggtgttacctctgcagagaaaccataaggggaaatgtcggaagcagttatctggaaggtggtcgattccggatccggagccgcaagggagcggaaagtctccatcacaggggctgtagttacaccgccggcatagccgaaggcaatgacgtagtagtcggtatcggcagcatcgagtttgtatttatacgggctgccggggccgcccgtgtaatcctgaacgcctttatatagcatggctccgttgttcataaagttgccatattgtgctacgatgtcgtccataacctccgtagctgtcttctgcccatcccacggagccaccatccagcagaaggtagcggtttcatctgtcggaacgatcttgatagcggcattcatagcctcgacctcaccaacggtaatttcgaaagtaaaatcttgggcctgggcattaccggtggtataggtggttgttgtaacatcggtagcgatggtcacctgaccttccggagttatgataaagcctgcgatttggttgatatactccgtgttggcggtaagtcccttgccttcgagttccaaagcccccttgtggaagatcgcattcataatttcagtatccgacatgccttgctgacgccgggcttcgatttcctgctggagacagaagagcatgaattgccgtgtttccatcttgtattgaccggcaggatcggtgtatgcgtcgtaagtggctttgggaagagtggtgaagtaccacacgtcatcgttgttcgaaggggtgattttgaatgttgcagagttgccgtccacagtcgtctcaacctcgaatgttatgttgagatcctggaactcttcagtcgtaacgtctttcttaactacgtcagagttagccttatatccgttggccggatctactccgaacaggatgatgtagtatttggacgccggggacagattcgagaacttgccattagtgatagcccccttatcaacgatttcaggcatatactctgctaaagtcttgccctgtgcgccggcttcagccttaagctcctccaagatggcctccacgagaaattcatcgcgagtaaacgactcgactgttttggcatcggccaatatgcacaggtactcggccttaaggtcggagggagttacagtgtaggcaatggaggatgaggtaatctcgccaaccgttacctcgaaagtcaaattaccaccatcggtagggggaatttgctcttcatcatcattacaagcggcaaacgatagtgcgaataccatcataagcgccatcaacaaattaaattttttcatacatgtttttggttaaggtttgtaaataaggttctaatgattaggtgttgtatcgtattttccgcacctcctgaaaatttatccgtagtacatttttactaatagcgcaatcttttacaaaaataaagatatatttaatttttcttttatgcaaattttaattaaaaaatatggatgtcgagggggaaaatagcttccgataattttcccgatgtgcattttatgacggtcgtgtgcgtgtaaccgatggatttttcctatatttgcctaattaataggtggactaattcttttacaaatgcggatacgacttttcacgataccgaatttattgaccctcatgaatctgctctgcgggtcgtttgccgtcgtggcagcactgatgtacaatgatttgacgctcgctttctggctgatagtcgcgggaatcgtgttcgattttttcgatggtttcgtggcccgtctgttgcattcgccttcggcgatcggggtgcagctcgattcgttggcggatgtcattacttcgggactggctcctgccgcagtgctctggcaggtttgcctgcagaccgaaccttgctggctgccggaggcctggaagctcgggtatggcgtgttcgtcctggcggcgttttctgcgctgcgtctggccaagttcaacatcgacgaaacgcagacggtcgaattctgcggacttccgacgcccgccggatcgcttctctgcgcttcgctcggcatgctgtggcagcagggaatgctcgctctctcttcggacggggtgttgctgatcgccgtgctgacctccctgctcctcgtttctccgatccgcatgttcgctctcaagttccacggcttcggttggcgcggaaacgaggtgcgatacctctttctgctggcgagtatcgtgttgataattatacttcgtacatacgctatcccggtaattatcgttttatatatcgtcgtgtcggcggttcgctggctctgcatgcactcgggaaatcccgataaagcaccgaaagcctgattttttactatctttgccgcgatttgcgcgtacgtattccgatgtttccgaaggtgttgaaaaaaattctgtggattttgctgtggggagggctgttggcctttccgacgttggaggcatccgctcaattcgacgccagcgcgatcctgcgaaatcagaacaatcagaatccgaacgacccgaataatccgaacaatatgctcggcagcaacccgttccagacgcagaacggcgaggaacaacccgccatgccgaccgattcgaccaagaaaaagcggattcgaaagcctctcgaatcctattttttcaacgattcgatccgtgcgctgcccaacttttcgtggacgatctcgcgggactacaaccaggtgcatatcaatccgctcgataccacgctcgccactttccgcatcgactacccgttttataaggaaggcgtcggccatgctgccgtgggtgcgttgggacaggcttcgttaccgtacaactacttcgaacggcctcaataccgcaacttctcttttgccgaagggttcgatgtctatacctatcgcatggaaaacgtccccttctacaacctcaaacggccgtattttcacttcatgtaccttgagtctggacagaagaagttccgggaggagaatttcagcctgacgctggggcataatatttcgccgactaccggcttcaacgtcaattatcggtcgcgcggtaccaagggcctttacgagtggtcccgtaccaagaaccacaacctttcggtcgccgtttcgcatacgggaaagcgttattcggtgcatgccggattcatcaacaaccacatcgagacgcgtgagaacggcggcgtggtgggtgaatgggcgattcgggatacgaccttcgaaatgccgtcgggcgtgccgatgaaactgacctcttcggaagccaccaatacctaccgcaacaatgcgttctttgtcgaacagtcgtacggtattccgttgctgccggttaccgaaagcgacttttcgatcgccaatctgcctgccgtattcatcggtcattcgttcgaatacaactcctggagcaaggtttataaggatattcggggaacctataccgacgaccgttacgagcgagatgcagatggtaattttgtgccgcaggatggactcgaatattacaagaactggttcatcaatcccacgcagacgcgcgactcgatctatgagcgggtgatttccaaccgggtgttcattcaggcgcagccctgggatcgcaacggcgtggtcggtacggtgaacggaggtgtaggactcgacctgcacacctattcgcagttcaggctggattcctacctgaacggtaagtacgacaaggtgggtaaaagcagttacttcgtgtatggatcggtcgaaggaaagatcaagaaatatgtcgattggggagctgacgccaagttctacccgtcgggatatcgcggcggtgacgtttcgttcggggccaacctgaccctgacgggatatatccgcaaacgtcccctgattctcgaagggcgtttccgtatggaaacgcgttcgccggattactggcaggagaatctattctctaaccactacgtgtggttgactcctttgcgcaaggagaatgaaactcgtttcgaagttgctttccgtgtccccgattatgcgttcgaggtcggtgtgtggcaaggcattgtcaccgataagatttattacggcgccgacagccagataacgcaggacaacggaaccgtcagcgtgacgagcgtgtacgcccgcaaagatttccggatcgccggacttcatttggaccataaggttttgttgcagtggagtacgaatcatagtgtcatacctgttccgctcgtcagcgccttcctctcgtattattacgagttttgggcggtgcgcgacgtgctccgggtgcagttcggtgtcgatggccatttcaatacgcgctactatgcgcccggctacaaccctgcgctctcggagttcttcaatcaacgggaaatcgaggtggggaattatccctacatggatcttttcctgatgggcaagtggaagagaatgcggatattcctgaaatatcagcatatcaaccggggcctgttcggaaacggcgaatatttcgcgattgcgaagtacccgctcaatccgggcatgttcaagatgggtatctcgtggggtttctatgattagcgtactgtacggcacaggaagctgcctgcaaaagcaagttttatgttaaagaaaacctgtttaattttcgtatttttaacattacagaccactttttacggattcaacgccgatttttcgacgtcgtccgaagcggggattaccctggaggagaaaatggaagcccggtatgtgatctctccctacgatcacgtaattcggaatatcagcgagcgggaggggaacgactggcgcctgatgagtgctattgcctatcacgagtcgcgtttcaaagccgatatagtttcccgccgtggagcgagggggctgatgcagatcatgcctgcagtggcccggcagttcgacgtagcctcggaagaagccttgctcgatccggaaaccaatgtattgctggccaataaagtgtggaatcggatcgattcgacgctcgacctgccggcgggaatttccgagaaagaccgaatgagcctgatcctggcctgctacaacggtggaatcggtcatgtcaatgacgcccggcggctggcccgtgtgaacggcgaagaccccaattcctgggaggtggtgctccgctacctggaactcaagtccgatcccgcctattaccagcacgaggtcgtgaagtgcggcaaatttaccggttaccgtcagacgcgggctttcgtgcaggacgtaatgaatcgttataataagtattgccggatcactcaactctgatccggagggcgccgagagggtaagtccgatagcaaaacaaaaaagcagggaatcattccctgcttttttgttagaaatagctgcattcaccgactgtcctttgtcgtccgtccgatcggaggaatagtctgacggcgaatatacctattcaccggttttgtccagccggtcgtaaatcagttcgaggtcatcgacgacgagcacgctcgaggtgcttccgatgaaatagtcgccccaacgggaagccgagcagacgacgacgatatgggtcggtttgcggtctgtcgccacgtacttcagcggtatggtaaactcctgccattcggagtagctggcggtgagcggcagttgtccgtagccgattacggccggactcgtcggatcgaagaacgaactggggttgcgggtgtcgatcgcaatcgggttttcggccgatccgaactgttctccctgcgagatgccgtactcttccggggtccaggtgccgacggcgatgtagatcatgccgttgtcgggatcgccgaccttgaggttcatccccggcggctgggtgctgcccacgttggtcagcattccctggttgtatttgaaccagccgtgcagagccgtcggacgggcttcgaaaggttgtccgaagcagacgataccgtgcgtgagatttcggattccgtagaatatgcctgtaaagagattgccggcggccaatttgtaaacgccgaccagacctgcgagcttcgacgaaagctgtgcggcatagatgcccgatgtgccgggacgcacgtccgtcgtcttgtcggtcggagtagcgttgccgatgctggcgcctttgttgcctgaattccagaagtgaatgccgtcggccaggtagggatagacgactttgtcgatcgtttcccactcttcgaaacctccgttcgggagttgtggtgctgcttcggtcgtgacgcttgctacttccgtttcgttgctgccggagtaggcgactacttcgtattgggtttccggggtaagtcccgtgatacaggtgtcgaatgcaccgcccgagatgttgatttgcttcttatcgacttcggtccacgcctcgtcgccggtcttgcgataacggaatcccagttcgtccgcgctgttgccttcggcataggcccagatgaccccgctccaggcatcgacctgcgtgaagcgtaccttggtatcggtagcttcgacgtaaagcgaccatttctcttcgaagtcgtggtaagcgacgtaaacgtagcggaccgattcgaacgaagtcagctcgtcgatcggaggtgtcatcgtggtaatgtccgccgggccgagtttcagccgtgtgaccttgaggtcgctcaaatcggttccttccgggacgtatgctttcgctgtaagttgatcgacgtcgatttctgcggcaccgatttgcgattcgacttcgaaataacgctcgatcttctggtccgccacgatcgtccattcgtaatcctgataaaacgaaagggtgatgtatagcggagtccgcaggtcgaatgttcccgaaaggggtttcgacgaccgggcattttcggtgaccgatattttgtcgatctttacgttggagatgtcggtttgttcgtccaaatgaagtgtgacgattcgttcctgggtattgatatcttcgggtgcgcaggtgaaaccttcgccttcgacaccgaggatttgcagcgtgacgaccggatatggaatcgaattttcgatgcaggaggtcagcagcaggagtatgccgataagtatatgtcggagatgtttcatcatgctttgttggctttcttgttccatagatgaacggtaacgccgatgcggatattgagcaggttgagccggaaccgcattttcgaagcggttcgttgcccgatctcgttgccgtcggcatctttctgtttgatcttggtgtattcgataccgcccagtccgaaggaaatggtgctgcacacgttcgggaagatataaaccgccagacccgggttgaacccgagcgacagtttcaggtcgtcgctgaacgtgcttctgagggtgccttcggtttcgtaggtaaactccgaattaccggtcttcatcgaaagatctacttcaccgaaaagcccgaagtgtcctttgctgtccaatcccgcataggagcggaaatagaggccgaccgacagtgcactgctttgcaggtggaggtttttgaaggccagattgacgtcgttttgctctcccagattgaaattgcccgtgtccagcgttccgttgatgttggtgtatccgaaacggacgccggccgacatgttgtccttgaagaagtagcctacagaggggttgatggtgaagatactgccgttcagattcaggttgtccaggatcagcaggtagtccgtgtcgtcgcttgagagggtgccgtaagatacggtgaggcccagggcgatttcacctgcataggcgaatttgattttgttgatttcacggtcgattctccgtttcatcggcaggaatcgttgtttccgacgtaccggggaaaccgaggtcggcatcgatgcggacgagtcgctcagatcggcgtagaacgtcggggccggaagttcctcgatgacagggacggtcgtcggaaccggagtggcgtagaggctgtcctgcaagcgggaagacggaattgcctccagggatgtcggttcctgggctcggagcatggaaaccgttgcgacggctatcagtatggtaaaaatcagtcgtttcatcgtatttccgcgttatagatagagagatatacccagcccgatcgacaggatattgactttgaaattcatcaggctcgaagttcgctttccgacggttacctggttgtgtacctggcgtgtccgggtgtaggaaagacccattacgccgacattgacttcgaaagctacgttgttggtggcgaaggctaccaggccgggcgatatgccgatcgaggcggagaaattggtttcgtaagtgccccggatcggggagtccgcagcgaaccgggactggccgccgcccaatgtcaggctggtttcgttgaacagggcgaagcgcttgttttgtcccagagggatgtactgacgccagatgaaagctccggagtagttgtgttgcagtgcgttgtagaaatcgacaccgaggtcgatgtcgctgcccagtttgatgctgccgctatctatgcggagcaatgagcgggaatagatgaatttgacgccgatagccatgttgtcccggatcgcgtaggcgatcaggggggtgactttgaaggtgtagccgtctgagttgatatcttcgattaccagaaacgtgtaatctttgttcgtgtgggtagagtaggaggcggaggctccgaaaatccattgtccccgggggacgaactggttggacatggaagtcaggccccgttctgcgcgaggatcggccttacgctccggggcggattccatcggagcaggcgattgtgcatcggtccgaagcggatgttcgggccgagggctttcggagcccgtgttcacggtttccgaagaatcgggttgcggtattgccgaatcaatcgcaggtcccggagcggcctgcgattgattgcttgcaaaacatagacacagtgacagtgtcagtgtcaggatggcgacggttcctcgcatgaaaatcaatatacaaattcgatgtcgtcgatatacattctgctctccttgttcccttccatgtagtcaccgcggtagctcgccgaggctgttaccatcaggtaattgggcttttcatcactgcggtatttgatgggaattacgatctttttccaatcgctttgggaggtatcgttgagccagtccccgtggccgtagatggggccttcgggcaggctttcctgggaaggatcgaagaaggtgctctggtcgttcgtgtcgatcttgtggtaggagctccatttgcccatgcagacgaagaagcgggccttgtcgccggacccgaccgtccctttgtaccagaatgtgatcgctttgggacgggcgttgaaggtgaacggacgacccatatacacatcgcctttggtgatgttgtgaacaccgccgaaggctccgatgaagaggttgccggcagcgattacgccgaaagcgctctgggtcttgagcagggcggacttgctcccggtcgatcccggacggggatcgtctgcgggttcggtcaccacgataccggcggcattggcaccggggttacccgtaccccagaatccggtatagcctgtacccatgccgttcgagccgatttcgtccgccgagcaggggtaccaggttttgctgttcgtccaggtttcgaatcccgcattgggaagctgaatgcccgttgcggccgagaaattgtgtatctcgcccgtttccgcatcgttgatgagcaactggtattcgtaatcgcggtctgcggcgaagtcgatggcttgtgccgtataggtatagtcggcacccgcaacggcggttacggtcttccactcaccgaaggcaggcgactccgccaggcgttcgcgttcgcggtaacgtactttgacgttggtgagcgccggatcggtgacgattacctgaaaatcggccgtattgagccagaggtcgtacaccgccaggtcggtgagtccgggtgttgcgatgcgggctttgcccgtaccttcggcttgtgcgacgtcggtcatcgtaaattctacttcgtgaatgccgccggcgaacgtggagaagaaggttccgccgagggagagtttgccgctgttgtcgtcggtcttggtgtagctgatgcctttggctgcggcttccggaagcagcgcgccgtcgctcaacacctggatcgtttcgtcgttggccttgatggagatgcccgaaagcgcctgtaccgaggatactgcgaacgaaatgtcgtccgtgttgaatccgattaccgagttgatgtcgaatccgtcgcccttgatcgtcggctgcgggctgaagatgaagggatcttcgtggatctctccgtcctgatcgacctgtacggtgatgcccaggtaaccgttcggagtcttcgaatacttgaatgtcagcgtataaagattgccgctttcgggtgtcggaatgactccggttttagaaacgctacccaactccgtgctcgagctgtaaaagccccaactcaggttgtgaacatcttcgggcagcaggtaataacccgttgcgttctcggtgtatttgagcgtcggtaccgagccgttttcagcttccgttttggagaaggtgtcgatggcgctgacgtaagccttgaatcccggatccattttgtccagaatcgtctgatcgaagacgactttgacgccgatgttggtggttgggcagactacctctttgaggacggtctgttggggttcgatatcgacgtccaattcgccgtaataactcttgttggtgaaggtcgcctggctctggtcccctgcttccactttgatacggtaggaccctgccaccaggtagaaatcacccggagcttccgtagccggctggtatttgcggatcagcttctcttctccgttttcgatcttatagacgcgcatgatactccgatccagagcgttgtatgcgtcggcacgcgagccgccgatattgacgctcaggcgcagggttcccatctcttccgaggcgttgccgtcgatgtcgctctgcgagcaggctgcggtcaggaaggccacgcctgcaagcagcgaaatatatttaagaatctttttcatcactgtttcggtttactgttggggaacatagagcatgatggacttgatgttctgtcccgaagcatccgttgcggtcaatttgaagtccgtgttgcccggagctacggcatagagcatcgtcataaactgagaaatgtcgaattgcagggttttctgtccgacgatttcgtctttggtcttaaaccctaacgagtggagtccttcgtccattttgtcggaagccggattgaccagatccatatgcgcttccaagccgataccgaggctttcgaggacttcggcggtgagggcatcgctgatgatatcgaccgtcaggccggttattccgctctcggaggcgaggttgatgaagacgttcataccctcctccgtgagcgtgtggcgggagtcgatatcgacaatatccgtaccttccggattggtgctccagaagatgttcggtccctctgcggtgccgctgtcgtgggtgaccttgatggtcattgtcgtgtaggagcgacggccttcggagtcgatggcgatgaacttcgcggtatgggtgcccgtgtggtcgtacaatcctttcataccgttgtaattgaccttgacgagcagatcggagccgctttgcttgactacgcagtagtcgccggccggattttcgcccggccagagggctaccgtgttgttgctgtagccggccgttgcgagagcttccaggaactgggcgttgtccgaatcgaagacaacctccagcgaggcaacggtcgaaccctggtaaggagttacgacggccgtaatcatcggggagcagctctgaacgtcgaagtcgaacatgctggtcgtgatggggtagggctgggcgatatccccgttttcgagggttactgccggagagttctcgtccgaaatttcttcgtcgggaatctcctcttcgccgtaagaatagaacgaagacatgacatccacgtcgattttctcgtcgtaaacccatgtttcgaccgtaacctggaattggacgttgccgtcgctggcatgcaggatcttgatgttgatcttgcgccattgtccggctttgacgttctgtatctcctggctccaattgaccggcacgtaggaggctggctctccctcgccggctttgttgtattggccggaaaggacgattttcagggtgttgtccgtatcgactgcgcggaagaaaccgggtttgagcgtttcgcccgtggcttcggggcgtccgtaaaccagggaattgtcctggatcgaaagggtgacggtgagtttgtctgtttcgtcgtccggcttgaacaggctgtccaaatcggcggaaagtccgaccgtcgccttgatatttcccaatttgcagaccaggttattgaccgtggtcgtgagctttttgattacgttgaccgaaatttcgccgtaatagacgggcgtttcccacgccacgtcgggtgtgctggcgtaattgggcgattccgccgtgacggtatagctgtcctgcggtaattcgatattgcccgtggtctttatttcagcataggtgtagctgccgacctgttcttttttcgaattgtaaatctttacgatataatcgtccggtgcgtccaccgtgctgcgcgtcgaagaggtgccgggagcgttgtccgtcggcaaaatttccatgtcgtccgctacggtcaggtcccagttctcaaagctcaggatacccgtttccgaaccgggtccttccggttgttcgcccgtcgggagatcgtcttttccgcatcccgccgccatgaaaagacagcagagcggcaagagcaaatatttggtaaaagtcttcataggatctgtttttagcttattttatacggggttatgcttcggggttgagttcgatttcctgcgggggtacttcggtcagcgtatcgtccagtcggatgctgatgctgccctgtcccgcctgcgaagcgtcgatccggattttgtgccaggtgcgggccgtcgtgacaccgatctgctgctgcgggaattccactttcacgccgttctgcgccttcaccgccgtacctttgagcagaagtttgcttcccggcttgacgaagatcggagtatcgggcgacgaggagtgggtgaaactgaaattgttgcccgcttcggtctggacggtgaattgcgcttcggaatagtatttcttgaaccactcgccgcattcgaggctgattaccgagttcgtgagcgaggcggtaatggtcttttgaatcgtcttgcgggcgagtattgtaaagtcgagcgctccctggtagcagaaagccgtgctgccctcctgctgcggatcgccgtagctgatcgtcgccgtatagtcgccgctgggcatgaagggggccgtatattcgctgagcgtggtgtattcggcgaggtattccgctgtcgcggtgccttctttgccttttacgaccagcttgaagctgttgccggacggcttgcagttgtccggcagggacgtttgcgcccgggtcgtctgcgaatcgacctcggagcaggtcgtggtccggaattcgaccgagccctccccgtctgtcgtttcggggatttcctctttcgagcagcccccccccaacagtgcaagggtcgttagaatcaacaggtattttttcatagggttattgatttggaggtttattttacgatggttacgcggatgttgtcgaggtacatataccaggttctcgatatccatccgttgccggtgaagttgtatgtcctttgaatcagccacgacaggcgcgttgtattcgttgctgcgggaacttcgcaggtgcatagtccctgaatatttccgaacgatacgccgctcagtgtattgaggttgtcgatctgttctttcaacgtgttttcgagaccgtcgttgccttttttaggggccgtatccgtgagggttccgaaactgcaatagagatagttgttgtccttgttggcattgaaggtcactttcagctttacggtttttccgggcttgatacaggcgagcggcggagtgtcgagccgtcccggatattgggctgcggtttcgtgtcggacggaaatacgcatcgccttttgcgaaacctgaagacgggttcctgtccaaccctcgtcaaagccgtactgcgacagcgagataccgtccggattggatgtcgtagcctctgttttgtattcgaaatcggttttgtcgtcgaaatcttccgaaaggaggtacgggattttgagtgcgatcggcagatgttcgccgggagtgaacgaagcgacgcttacgttttgcggaacgattgcgctttcggtttcgaaactcacctgcaacggttgctgggccagcagatcgccgtaaaggtcgccgtagaaagccaccgtgtatttgttggattcgtcgatggggaaggtctgttcggtcgtaccgttgcggaaggtcattccttcgggagctttgatgatcaggttgtaaggctcttcacccagattcgaggagtcgcccgtgaccgagaaatcgacataacttaccggcaactcggtcgggatcgtcaaggtaatgggggtgatgtgtcccgccgccatttcgcggttgatcgacacggagagcgtgtgggagcggtacccgtttgccgtgtaggccgtaaaagagatgtcgccgctcatcgtcgtgggattgatgaaggcccaggcatagttttcggcttcgtccgtcagcggagtggccagatcgagcgtgatgctcttcgagccttcggccagggacattggggccgaaggatcggcagcgtcgaacgaaacggttccgacgacttctgtcggaaaatcgatgaccagtcgtgtgatcggttcgccccagatgttgcgaccggcagggacttcgattcgcagtgcgtggcatttgtgacggaagcgcagcgcgtgcgacggcggagtttcgagcatttggtcggactgttcgaacaggggaagcgcgtcggcggtcagcggatcggcggccagaatatcccattttccctcgtaacggcccgtctgttctgccggaatttggtaagatacctgcgtgccgctgacgctttcgggcaccgggctgacggccgtgtaggtataggttcctgccggcatatcggcgaccgtcgagctgaaaacggcggtcgaatagctgggggtgaagtaggccagcgagaaatgctgggcgttgagcgtatagttgctgccgtcggcggtcgcccaaagggcgatcttgtcgtttttgtcccagcgggtcgaagcccagtcgttgtcgtcgatccaggttcgggtgccgtcgggcaggctgtaaatctgcggctctttcgtgttgtcgcacaaaatggctacttcgactccgccggacggagacgtctgctgctcgatttcctcgttgcgggagcaggcgccgatcagaaacagcgccagtacagagagaagaatccgatgtcttttcgccatcatacagttcatcgattatatatacggtttttacaaaaataggcgggttttttctataatggaaataaattcaacgaaacggggaaagttcatcacgaatccccggatttacgggcgttttgtttgagataacagcgtggaattaacgtcaaatacctccttattccaaggaggtatttgacggaatatcgctggaatggagttaatatacccattcgaagtcatcgacatagaggcaggctttcgagtagcccgtcatgtagtcgccgtaggcattcgcggcgcatgagatcacgatcgtgtagttccctgtgggagacggagctttctcttcgtaccaatggattttgagtgcgtcttcggaagaaaccaaggcatcgccgggggtgctttgatcgatccacatcgagccgtagccgacgactttacctgcttccgatacgacgtccgctccgttggccggatcccaggctcccgtggtcgagccggttcccgaaacgaccgtgtggggctgggaccagtccacgatcgccacgaagatacggcatttgtcgggatcgccctttgccacaccgggggccggattttgcgatcgcacgatgtcgatgtcgccggtcgtggcgtgatattttacgcgcaaagccttgggacgtgccgtgtaggtgtatttgctgccgaatttcaccgtaccggtcatgctggcatagttgaaactcccggtaaagagattgcctgcagccaggacgaacatatttttgctctgcagtttcgctgcgggtaccgctgcgccgaatttatccgtggtagaagaacacaaatctgtcgtgatgccgttattgccgcagtcccagaaagaatctccggttttattggggtagggaacgtctttgcttccggacagacctgcccgggaaacagtactccattccgacatgtccgcgttgggaattacatcgcctttggccgttgtgaaacgtccggtttccttttctgtaccgtccagcttcaagcggtaatcgtaggtcgtacctgcgaaaacgccggtggcatagtccggttcgtaaacggttttacccatttcgttggtcgatgaactccaggtcggctcgatcgcggccgtgaaagtgccgtcgccgttgtcggaaacggtcgcctgctgccaggcgtcgtcggtgctgcgcttgtattcgagcgtcgcgctcgcggccgttgcggaggggacgattttcagcgttgcggtattttgccacaggtcggcggtttcgagcgttacctggccgtaatggaaggtcaggtcctgtacggtcgtttggccggccaggtcggtaacggacaccttgaatacgtggttgccgattgcgtcggggagcatcgcaatcatcgggacgagcttggtgatgtcgaatacggtcgatttcgtatattggatctccgtgccgcatttcagacccaagtctttgtattggatgcttcctgcgatcgaagtttcgtgtaccagatcgaggttttgtatccccagcgagttcagggcgtcggaaacgatttcgactttcagttcggcgataccgcccggtaccgtgatgtcgatggctgcggggtaggtgagcgactggtccggccctaccgtgatttcatgcgtggcgtcgatgtcctggtcgggccagtcgagcgacggggcaggaatggcggaaggggtcagcgtgccgacctctttcttgtagaggacacccgcctcgaacggcttgtcggtacggtcgatctttacggaggccatctgtttggtggcggtaatgatgtccagattcaggttgtaattgcccggcaggacattgaagaaggcatccagttgagctgcggccgatgcagacccgccgtcgaagtttatcaaaatcgactttgaccgttcttccgtgtcgagtgcgggcgcggcggcttctccctgtgccaggtcgaaattcagggatttggccgacaggaaatcgtcgctttctgccgtcagcagcacgcagcgaatcgggtcggaggtcgaattggtcaggtcgaaatccaggatcgacgtcaatcgctgcatattgaagcggatcctttcgccgctgtcatcgacgccttccgctgaattggccgtagtctgtgcgggtgcgaccagaatgtcgaacaggctgttgtaggttccgcccttctggatgcgggtattgccgaacggaatggtggccgacgtgccgttcagggattgttctccgtggggataataggccaggtaggtccaggcgccggttcccggagtgagttcacctttgaaaatgccttcgcttgaaaagacgaaaggtttgttgacttgggcgatgccgttcagcgttgcgtgtatgccgagtttgtcgatatcgacctcccaggcgccgttgaaacggtcgtctccgatttcgatcgtcgcacgggttgccggcagttctgcggcgaaagagactgggacggtttttccgtcgctcccacctggagcggattcatccgtcgaaggatcggcggagcatccgcagaggagagccagtccggccgtcgcaagagcaagagtattgattatgcggttcataagttcgatgattttaattagtaactgtcgttcgttgcgtcgttgtacgacataggttctacggtgccgccggggaaagagtcgccgaatccgcgctttatgcggatgtccataactccgattgtgggggctacatagctgcgaagcgtcttgattgtttccataataatctgattttaggtttgggatcaaaattatagcttgtggaacatgaaaaaaaataaattcaacgagcctgggaaaagtagtaacgaacagccggtttttatcaatgactttcgagttcgtccgtgaaaatgaaaacagcggccttctttcagaaaggccgctgttcgcatcgaaacggttgaaaaacgctattttttcaggtatttgtcgagccagccgaaaaattcgcggttccaaaccaccgagttctggggcttcatcacctggtggtcttcgtcttcgaattcgaccagacgggcgtcgataccgtgcaggcgtgctgctgtgaaggcttcgagcgactgcgtatagggaatacggaagtcgagttcgccggtgatgatcataatcggcgtatcccacttatcgacgaacttgtggggcgagttggcgtaggtgcgcatggccgtcgcgttctgtttgtcccagtaggggcctccgtagtcgttgttcaggaagaaaagctcctcggtcgagccgtacatggcttcgaagtcgaagataccgcagtgggagatgaaagccttgaagcgtccgtcgtgatgcccggccaggaaatagaccgaataaccgccgtacgaagcgccgacgcagcccagacggtccttgtccacccagggctccttggctacgtcgtcgatagccgagaggtagtcgcggatattctggcccgagtagtcgcccgagatctggtcgagccactcctgtccgaacgaaggcacaccccggcggttgggggcgacgacgatgtagccgttggcggccatgagctggaagttccagcggtagctccagaattgcgatacgacgctttgcggtccgccttcgcagtagagcagcgtcgggtatttcttcgcagggtcgaaatcgggcggcaggattacccacgtcagcatctgtttgccgtcggtggtctccacccagcgtttctcgactttgcccaggcggatcttgtcgagaatcggctggttgatgaacgtgagctgcgtgatggctccgtctttcaggtcgatttcatagagctccgaaggcgaagagatcgtgcagatatcggctacggccttgccgtttgcgatcgatacggcgttgatgtcgtggtcgccccgggtcagtacggaaacgttgccgttcatgtccacgcggcagagctggtgcgtagcctccatcggcgcgaggaaccaaagcgcttcgctgccgtcccagatgacgttggtagcgttgtagtcgaaattcttcgtgagttccttcaccaggcccgtttcggaattccagaccatcagacgctccttgtcggcttcattgcccgcacgacgctgcgaacggaatgcgattttggtgccgtcgggcgagaatacggggtatttgtcgtagccgacgaaaggcagttcggttttggctgccgcatcgtgaccggagatgggggtgagtcccttgcagatgttggtcgtggcgcctgtctccgtgtcatagacgaaaatgtccgagtcggtcgaaacggcgtatttcgcacctgtcagcggtttgcaggtgtatgcgagtcgggtgccgtccggagcccacgcgatttcggacatatcgaaatagggtgccagcggagtgtcccactccgcaccttcgccgatgatgtccacgcccttcccgatgccgccggaggtcagctccgcgatgaagatgtggcggtattcgccttcatcccagcggtcccagtggcggcacatcaggtcgtcgtaaacgcgggctttcgattcggccatgtccgggtggatgtcggacgacttgcggtcggcgacctgtacgccctgtacataaaagactttgtcacccgcaggatttacgccgaacccttcgatgtccttgtcgagtttcgaaagctggcggggattttgtccgtcggcagccatttcccagatttgcgaacttccgctgcggtcggacaggaagtagatcttgctgccgtcggcattccatttcggatcggagttgttcgatgagaagtcggtcagctgggcgacttcgccgctggcggcgtcacgaacgtagatcgccgtaacgccccggttctcctgcatattgtaccaggtgacggtgtagagcagccgactggcgtcgggcgagagcgaggccagtcctacgcggcccattttccacatcacttcgggcgagagaacgccggcggcgatctcctcctgggtgagcgagttgtcgatagcgaggggctgggagcgcttttcactgcatccgccgagtcccacgagcgtaattgccataaagaggaataaatttttcatttgagatcgggtttacttcatatgatttatacttaaatttgcgcttgtcaatagcgatttttatgcgtatctatctatattttgcagataaaactctgatttttaccgatgaaacgtcgccggcacgtttttttgccgtcgatcttccgcagggcgggcgtatttcccggacgaagatacttaattttctggaaactcacaatgaggttgcggtttgtacgcccgatcccgagcaggcgttttccctcttccggcaggaattcgctgctgtcgaggctgcgggcggcgtggtagtgaacgatcgcggcgaatatttgatgattcaccgcaacgggcgctgggatttgcccaaaggacatgtggagccgggcgaaagtacggcggaatgtgccgtgcgcgaagtcgccgaggaaacgggagctgtgggtgcggaggtggttcgcttcctttgccggacgttgcatgcctattatatgcacgggcggtgggagctcaaggctacgcactggttcgaaatgcgcgtttcttcgagccgagcccttaaacctcagcgggaagagggaatcgatgtggctgcgtggtgtccggccgccgaactgaaagatcggctcgaagggatgtttcctacggtgcgccgggtgttcgaatgtttggaaaaatagaggccgcttttcgtgccggatagatagaggacgatttttccgccggcccgatgtcgcggcctgtccgggacaggcggttccagcctgataatttgccttgccgtatcggtttcaggctgcggtattgtccggaacgagggtatcaacgaaaaacccggtgcagatcgcaccgggtttttcgttgggtattcggtattacatcggtattacatcgcgctgccgttcatggctttggccatggcttcggcgatttggtcgagcgctttttggagcttgcctccgatcatcatacgcatcatcatattcagttccgcgtgcagcaccagccgcatgcgggtatcgtagggacctgccggctgcaactggatccagaaggtgaagtcgatggggacgccgccttcgccgctctgtatcttgacgtatttgggagcttccttggccacgatttgcagattgacggtgaagcccttgactttgaatgaacaactgttttcgtcggcctgccactcttcgaccttgtcctgcaccgcaggagtgaggttgtcgaaacggctgatgaccgtataaatctgttccgccgagcggagtatctgttggtgtttcgattcgtatttttccattgtcgtgtgtttgtcgtcaaaagcggcggttgtctttttttgcaaatttttcgcttttcccgggcgaccgtttttcgaagcccttatttttcggggccaaagatagtgaaaactgggagaaaacgggatcttgttcccggttttccgaggcgcatcctatctaagactatgtcaaagatagtgaaagccgagcgctaatccaaacttaactttctgttttcctattccttgcatggtagagttcacaagtgtcctctgcgtatgcttcgaatgtcggtcgtttgagcctgccccccccctatttgctgcaaggatgataaagtgtagcgagccgaatctgaccggcgggttcccgactccttcccgtttcacgttgcggggtggggaaacttactacgcccgatattcgtttcggcagtcggtcgttcgagccgggctggatcacacactctctgttgcaaccgtgtgccggatgatctcgcctgctggagccggagggcgggaagtctgtgttgagaagtactatacagggatattgggccgaatcgggagtcagtcgatttcgatcgtgcgctcttcgtcgtcgccgacggcgatccgcacggtcatcacctcttcgggcagcagctcttcgatcttctcgggccattcgaccagacagagattcccggagtagaaatattcttcgtagccgaagtcgtaagcctcttcgagccggttgatccggtagaaatcgaagtgatagatattcttcccttcgcgggtcgtatattgattgacgatggcgaaagtgggacttgtcactgtgtcgtcggctccgagccgggcgacgatttcccggatcagggtggttttgcccgcccccatttcgccgcggaaaacgacgaccgagcgtccttcgagcgcgtttatgacggcggccgctgcgtgcggcaattcgtccagagagtcgatgtggatggtctgcatgatttattgtttgggttttagtacgatgtagggaacgagcatctcttccatcgagattcccccgtgctggtaagtattgcggtagtaccgtatgtaacggttggcgtcgttgttgtagaccaggaaatcggtgttgtaggcgaagatgtaactcgacgacaagttgatcgacggcaactggatgtcttccgggcgggtgatttcatatacctcgcgggagttgtaggccaggttgcggccggttttgtagcgcaggttggccgaggtttcgcggtcgccggtcaccttcaccggattgtcgatgcggatcgtgccgtggtccgaggtgatgattaccgtgtgtccgcgttccgagagcaggcgcagcagtgtcagcaggtcggagtgttcgaaccacgaacgggtgagcgagcggaacgaggcttcgtcctcggtgagttcgcggatgatgtccgtttcggtgcgggcatgcgagaggatgtccaggaagttatagacgatcaccgagaagtcggcgtcgtaaatccgctggatgttgtcgatcagcttgcggcccgcctcggggcgcaccagtttgtcgaaggtgtatttgtagttcttgccgctggaggtcatcagccgttgcagaaactgttcttcgtattggtttttgcctccctcctcgttgtcgttgagccacttgttgggcatcagcttgtcgatggccagcggcatcaggccggcgaaaatggcattgcgggcgtactgggtcgccgtgggcaggatcgcgcagtagaaatcgtcggccgcgatgtcgtagtagccgcgcagcagggggctgatcgagcgccactggtcgtagcggaagttgtcgatcagcagcagcgtggtcttgggattctcgtctgccaccgggaagatcttcgaccgcatgagcgtatgcgacatgaccggggtggtttcgtcacgcttgttgatccagtcgtagtagttcctgcggacgaacttgcagaactcctggttggcttcgtgcttctggtattcgatgacctccttgatgctttggtcggtcgaatcggagagctcgatctcccagttcgtgatccggcgatagacgttgcaccagtcggcgaaactgtcggccatctggagtgccgaggagaggcgtccgaactccgcccggtaatcggccgtggtctgttcggtgaccagctgctgggagtggacgttcttcttgatcgagagcagcacctggttgggattcacgggtttgatgaggtagtcggcgatcttcgacccgacggccttgtccatgatgttctcctcctcgctcttggtgaccatgatgaccggagtagtggggcgtatttccttgattttcggaagggtttcgagtcctgtcatacccggcatcatctcgtccaggatgatgaggtcgtagttgccctccgtcgccatgtcgatcgcgtcgtatccgttgttgcaggtatcgacttcgtaaccttttccccggaggaaaagcacatggggtttcaatagttcgatttcgtcgtccacccaaagtattttgaccatattcgcggttttagttgaaacaaagatagtgaaagccgggagaaaacgggaacctgtcccggtttcccgaggcgcattctatctaagactatgtcaaagatagtgaaaggttgcgggcttgcccgccgggattgccgaaccggatcctatcttctacaaaaatagtgattttaccaattatacaatgcgaatttcgggcaatttattgtgcccgacggacgaaactttcgggcggcggtgtccggttccggctatcgggttgtttgataatgcgttgcctttttccggatattcttcgatacggtccggctccggtcggcccgccgggtatcgaagcgcggttttatggcccggtatttgagtaaggggtttcgaactgcggcgcgacgcgggcgaggtgaattgcaaaaaaatgttctactttgttgtgatataatcaaataaaacttatatttgcagtcccgaaatagagtttaacttataaatataaagagtatgacaaaggcagatatcgttagcgaaatcgctaaaagtaccggtgctgaaaaagtacaggtccaggctatcgtcgaggcttttatggagagcatcaagggttccctggcgcagaacaacaatgtatatctccgtggtttcggcagcttcatcgtgaaaaaacgcgcgaagaaggtggctcgtaacatttccaagaatacgaccattacgatcccggcccacaacattccggccttcaagcctgcaaagagttttgcggcaaaagttaaataaataatagaaactttaaacaattacagttatgccgaacggaaagaaacataagcgtcacaagatggcgacccacaagcgtaaaaaacgtcttcgcaagaatcgtcacaagaaaaagtaggtagtacgccttagtgctaattaaggtagataaagctaaaagggtgcgaggcccttttagctttacctgttttccgattcccgctccgttcgcagggcgggatgtgtcggatcgtcgggaaggagaggacgatgtgtttgtgaacgtatcaccgtatatcgaatccgctcccgaaaagccaaaagaggctttttgcgaagggaatgtgccgcaatatcgtcctctacggaccaggcgagttgaaaacaatggaagccgggctgtgcttcccgaacgccgaacagccgcaaaccccataatgtcagaatcgtcgccgcggtctgcgggacgaaaatatatatgaaccgagaattaatagtcaatgtaaacccgaccgagatttcgatcgccctgtgcgaggacaaggtgctggtcgagctcaacaaggagcagtgccagacgggattcgccgtaggggatatttatctgggcaaggtgcgcaagatcatgccggggctgaacgccgcgttcgtcaatatcggccatgagaaggatgcctttatccactatctcgacctgggctcccagttctcttcgttgcagaagctggtggcgagttaccagcccggcaagcggggaatccgcctggatgcgatgaagctggagccgccgatcgaaaagtcgggcaagatcggctcctacctgcaggtggggcagaccgttatggtgcaggtggccaaagaggcgatttccaccaagggaccgcgtctgacggccgatatttcgctggctggacgtaacgtggtgctggtgcctttttcgtcgaaggtgttcctgtcgcagaagatccgctcggcggaggagaagaagcggctcaagggcattgcagccgccgttttgccgaagaatttcggcgttatcatccgcacggcggctgtcgaggccaaggacagcgatatcgaacaggatatccgctccctgttggacaaatggcagaagaccctgcaaaatattcgcaagaaccctgctccggcccagttgatgagtgagatgaaccgggccaacaccattatccgggattcgttgggaggcgccttttcgcagatcgtcgtggacgacgaagcgatgtaccatgagattcagaactacatccgtcagatcgaaccgcaaagcgagaaactcgtaaaactttataagggcaacgtccccatcttcgacaatttcgacatttcgaagcagatcaagtcgctcttcgccaagtacgtgtcgttgcgccggggcgcttacctgattatcgagcatacggaggcgatgaacgtcatcgacgtcaattcgggcaatcgcaccaaggccgaggacgatcaggagcagactgctttcgatgtcaatctggccgctgcgcgcgaaatcgcccggcagctgcgtctgcgcgatttgggcggtatcgtcatcatcgactttatcgatatgcacaaggctgcgaaccgtcagttgctctatgaggagatgaacaagctgatggccaccgacaaggccaagcatacggtgctgccgctgaccaagttcgggctgatgcagatcacccgccagcgggtgcgtccggtcgccgtgcaggatgttacggacgtctgtcccacgtgcaacggcacggggcgtatcgagccgaccgttctgctcgacaagaagatcgagaacaagatctcctatctggcccaggatgcggggcacaaatatatcaagttgcgcgtcagcccttacgtttcgacctacttgaatcacggcctgtggtcgttgcgccgccgctggatgtggaagtataagatccagttgaagatcgtggcggaccagagcgtcggtatcgtcgatgtccactactacgacaaggagggcaaagacctgtataaggattagagataccggatgccgcaggggcggaggcatggactcggtcgatgtgccggatgggattcggccccttttactggccggaaggcggacgaagtccggagccggacaaaggcggaaggtggaaagacatacatgttcggtcgcaggtacgatctgcagccgatacgaatacacggagttgaataatcgtttgagcgccttgcggaatcgattcctgcagggcatcttttagctgggcggaatatgggtcccggaaataaaccgaatatcttgcagttgatcgccggagcggagcctctcggcgcgatgcgtcgtgcgtacgattcggcggggcggaccgttcttctgcgcgatatggtcggcggggctctctcggtttatgccgctgccctgatcgcccgaacgggcggtacgcacgtcttcgtggcggaagaccgcgatgcggcggcctacctgctcaacgatttttatgccctgctcgacgaaaaacaggtttacttttttccgggctcctacaagcgttcgatcgtttacggtacggaggatgcgcagggtgtcgtgcagcggacggcggcgttgagtgctctgcgtcgggaaatggctgcgggcgaataccggattatctgtacctatccggaagctctggccgaacgggtgaccgaccccgactcgatgcggcgcgaaaccgtgcgggtgaaggtcggcgaccggctggcgatcggagagctggaggagttgctggccgattcggggttcacgaaggtggatttcgtttacgaacccggacagtattcgctgcgtggcggtatcttcgacgtgttttccttttccgagagcaaaccttaccggttggactttttcggggaagaggtggattcgatccgccgattcgagatttccagtcagctttccgccgaccggctgaacgaggtggagatcgttccgaacctgaacggttttgccggggatcggatttcgctgctcgcatttgcaggagaggcgacttactggtttttcgatcccgactacgtactgcggcgcgtgaacgatctgcgtcgcaaggttctgggggagatggaggaacctgcggagattgacacccatctggtgagccggaaggtgttgttgcaggacatggccgggatgcgtttgttcgaattgcgtgatagcctgaaggagcggccggccgatgcgacggtcgcgttccgcatggctccccagcccaagttcaacaagaatttcgaattgctggccgacgacatcatttccaatggacagcgcggttataaaacctatatcctgtcggaaaaccgggcgcagctcgaacggctggagaacattttctaccagtcggggcgtaaggaggcgcagatcaaccccctgccgatcacgctgcacgagggtttcgtcgatcacgacctgaaactttgtttctataccgaccatcagattttcgaccgctaccagcgctatcggatcaacggcgagatcaagcgcgacgagcagatgaccgtcgcagagttgaatcagctccgcatgggcgattatgtggtgcatatcgatcacggcgtggggcgtttcggcggtctggtcaagatcaacgagaacggcaaggtgcacgaggctattaaattgatttataaggataacgacgtgctgttcgtgcatgtgcacgccttgcaccgtatttcgcgatacaagagcggcgaaggcgaagcgcccaaaatctacaaattgggcagcggagcctggcagaagctcaagaccgcgaccaagaaggccgtcaaggacatctcgcgcgaactgatcgccctctatgccaagcgcaaagccagcaagggatttgccttttcgccggatacctatttgcagcaggagctggaagcttcgttcatgtgggaggatacgcccgatcagcagaccgcgacgcaggccgtcaagcgggacatggagtccaatcagccgatggatcgtttgatttgcggcgatgtgggcttcggcaagaccgaagtggcgatccgagcggcgttcaaggccgcgaccgacggcaagcaggtggccgtgctggtgcctacgacgattctggccctgcaacattaccgctccttcgtacatcggctccgggattttcccgtgaaggtcgaatatctcaaccggaccaagtcttcgaaagagacgtcccgcatcctatctgagctggccgagggtcgcatcgacatcctgatcggtacgcacaagatcctgggcaagcaggtgaaattccacgacctgggattgcttattatcgacgaggagcagaagttcggcgtggcggccaaggagaagctgacgcagatgagcgtcaatgtcgatacgctgaccctcaccgcgacgccgattccccgcacgctgcaattctcgctcatggggtcgcgcgacctctccgtcatctcgacgccgccgcccaaccgacagccgatcattaccgagtcgcatctcttttcggaggagattatccgcgacgctgtcaatgccgagctggatcggggtggacaggtctatttcgtccacaaccgggtggaggatctgatgacgcttcagggtatggttactcggctctgcccccgggcgcgggtgggaatcggccacggcaagatgccggccgaacagctcgaaaagctgattatggattttatctacggggagttcgacgtgttgatttcgaccacgatcgtcgaaaacggcatcgacattcccaacgccaatacgatcatcgtcaataatgcccagaatttcggcttgagcgatcttcatcagttgcgcggacgtgtgggacgcggcagccagcgggggtattgctacctgctttcgcccggcgacgagctgctgactccggatgcccggcggcgcctgcgggccatcgaggagttctcagatctgggttcgggattcaatatcgccatgcaggatctcgacattcggggcgccggcaatctgttgggcgccgagcagagcggctttatcgccgacatcggtttcgaaacctaccagaagatcatgcaggaggcgatcgccgaactccgctcggagggactcgagatgcccggcatgagcgatgccgagcagggcgtggtcgataagatgagctatatttcggatagcgtgatcgagatcgacgtcgaggccgagctgcccgactcctacgtgcagcagcccgccgagaaactgcgcttgtaccgggagctggatacggcccgcaacgaggagatgctcaagagtttcgaggccaagatgatcgaccgcttcggtccgttgccccggcccgctgccgagctgctcaatgtggtccgcctgcggtgggaggccgtgcggctgggtatggagcgcgtgaaggtcaaaaacggcttgatgatcgtccatttcgtaggcgacgacgattctccttactacaagagcgatacgttcatggagcttttgcgcaaagtgacgcagcgccccgaccgatttgttctcaagcaacacaataatcgcctggcgatgaccgttagggggattaaggatgtcgcagcgggatacgaggtgcttaaatctttgtagaaagagctggggagtatttttgatgtatggacttgcccgaacgcgaccgatatgcctcgtctttttcccgaagttcctccctcgggagagggtcggaggacggcataacgctccgcagggttgtggggtgccgccgaaatcggtaagagaacggtcgtggtaaccgaaaagtatataactgctataaaaactgaatccggacggttgtgaacgattcgtgccgcagtgaacttggagagcggccgtgccggacggaaagaacgaagcaaaaaattcaacgatgaacctgacgatcgacatgggtaacacgcgggtcaagtacgctgtatttgacggcggtaccgtcgtttccgacggatgttcggaagagttcgacgaagcggtgatagatcggattcttgctgctcatcccggtattacgcaggctattgttgcgactacgcgcggtccggtcgatgacaccgtcgcgctggtgcgtcgccgcatcgggcgctgtctgcggctctcaccgcaacttcctcttcccattcgtaacggttacactacgcccgaaactctgggtgaggaccgtcttgcggctgccgtcggcgctgcgtcgctctacccgggccgcaatctgttgatcgtggatttcgggacggccattaccatcgatcaggtttctgccgacggggttttccggggcggtaatatttctcccggcgtacagatgcgcttccgggccttgcacgattatacggcggcgcttcccctgtgtgaatcctgtgaggaccagacgcttttggggcgttcgaccgtcgaggcgatccggcagggcgtgatgaacggcattgccttcgaaatcgaggggtatatcgcccggctgtttccggaaatcgatgcgttgtcgataatttttaccggcggggatgcaaaattctttgttaaacgaattaaaaatacgatatttgcacattgtgatttggtctttctggggctgaaccgaattttagagtataatgcaagtgaagaaagccgccgttaaactgtgcctcgcgctggccgtcattgtaccgtgcatggcatggggacaaaccagcagtatcaacgctttttcaccgtattcgatgtacggtctgggtgaactgcggaccccgggaacgcttcagacacgttcgatgggcggtgtcggcgtcggtatgcgtaatgcggctgctgtcaatttgctcaatccggcggcttacagtgccgtgcgccccaagtcgttccttttcgatttcggtcttgaagggcagtgcttttacaattcccagaaatattacgggcagacgctcaatacaagttattatacggtcaatttccacgacattgcgtttcagttgccgattgccaagcatttggggttgggcttcagcctgacgccttacagcagcgtcggttaccggatgaaacaggaggtggacgacgatgaaatctggggtaatatcggccgcgtgcagtaccagtgggacggcgacggcgacgtgacggaggtgaagctcggtctgggctgggagatcttccgcggattctcgatcggaatagctgcccagtactattggggcgacattcagcggatttataaaaccgctattttggagaatataaccggaggaggtcttatcgcagacgcgacgggaaccgaaacctacagcgtttcccgttttaagggacagttcggcgtacagtggtccccgatcagcaaccgtcggcgtattctgacgatcggtgcgacctacgatatcggcggcgacttgaatccgaatgtgacgacgaaggtgcagaccggcgatattttcaatacggtcgctatggatatgggaaatcgtctggggctcaagctgccccagcaggttgccgtaggtatttattacaacacgcctaaaatagctgtgggggcggattacgtctatcaggactggcgaagcggcaattctcggttggtcgagaaatccgcagccggtttcgatgtggcttaccggaacacgaatacggttaaactcggggtcgaatacacccccaataaagcggatgtacgcagcgcattgaaacgctggtcctaccgggccggagttcgttatggtacctataaccagactttcggcggagtggatgtcaatgaatacgccgtgacgctgggcgtcggtattcccctgacggtgttgggcggcatattgggtgcgtcgtcggtcgatctgggtgtcgaagtcggcggacgcggcagtttcaaggcgatcaacgaacaggtgagtctggttaaacagacctattgcaaattttcgctgggtgtgacattgttcggtgattattggttcgttcgtccgaaatacgattaaaccacacataaaaaataaattataaagaagaatatgaatcgcatgaaaattttgctgtcggcagtattggtgttcgctgcgacagcttcgatcgcccaggatttcagtgaccctcggtacgctccgtggggagatacgcccgaacagcgtaagcaaaacattctgacgagcaacctgctgaaggaagctgtcgatacccgcgattacgacgcagccgctgtttatttccgtacgcttgcacaggaggctccttcggctttcgaagcgacctttattcggggggcacaggtttattcgaacaaggtgcaacgcgcacaagacctgaatgagaaaaaagctctgctcgattcgctgatgatgatttacgacctgcgtgtacagtattttccttccagtcccaattacggtacggcttatgtccttgaccgtaaagctcgtgaatacctgactttcaatccttccgaccgggaaggcgtgcgcaagttgtataaggaggcgatcgaagccggtttgcagagcggttatgctgcgctgccggatgtcgcattggtatatttcagcaatttgtgcgatgattataagatgggcgaggtctatccggatgccgttttggatgagtacgctcgtctggccccgattttcgagagtgatgctcctggagtaaaggaggcgaaaacacagttcgatacttgttttgcgggtagcggtgctgccgattgcgagaacctggagaagatgttccgtccgcgtatcgaagcggctccggaggatatggagttgctcaagcagacggtttcgctgatgtcccgttcgcagtgcagttccgaatttttccttcagatcgccgaaaaatattatgcgatggaaccttctgcccagacggccatgatgctggctcaaggatttcaagagcggggcgacttcgccaaatcgactacttacctgcgtgaggcgattgctgccgaacaagacgccgttcagaaagaattgcttctggtgcgtttgagtatgaccgaactggcagccaagaatcctacggcggctgcagttgcggctaatgaggccaaggcgctgaatcccaataacggtatggcttatttcgccctggcgcaggcttatgcggcttcggctgcatcttgctccggactggagggtcaggctattttctgggtcgcttacgatacgatgacgcaggcagccaacctgcttgccaacgacgccgatgccggcaatttcgctcagacggcgcgtgatgcggcagcaaactaccgtcgcggattcccgactgccgaggaatgcttcttcaacgaattgatggagggtgcacgttatacgattacctgcggtccggcccgcggtatcgtgacgaccgtacgcccccggtagcgacatagtttgtacgaacgatgctccgaagcattcaacgatatgcacaggtagcacttctcatcgcgggaagtgctatcttgctatattcgtgcgacaaggagtcggtggccgaagagcctaacgatgaggctttgatgaccgagtacagcgagcatttgacgatgaccaatacggagaacggccggaaatcctatgtttttacggctcctttggtggaaggttactctttggcaaaagagccttatcaggaatttcgcaagggcgtggatatcgtgacatatcagaaggacagtaccggagcggtcgatgctacgctaacggctaactatgcgattcattacgggaatcggaaattatgggaagccaaaggaaatgtcgtagtgaaaaaatccaacggacaggagctctacacccagcagttgttctggaacgagaaaacgcgccggatctggtctaacgtcgattccaagatcgtggaagagagcggaaattcctacatcgtcgaaggattcgagtcggacgatcagttgaaagactggaaatttcgccgaatcaaagggcgtatgtgggtcaatatcgagccgacacgggacgcggattctacgtcggtgaaacccgttgcggacaatgtttccgctgcgaaggaggcagtttccgaacagcctgtcaaaccggcccggccgatacgggggaacgaccggaaaattcaactgactcccgtagaaagtaacgatcgttccttatgataacttcggtgtttataattctgctgatgttgttgctttcggcttttttttcggggatggagatcgcttttacgagcaagaaccgcctgaaactggagatcgaccggaagcagagtcggctgttcaatttcatcgccgacatttttgcccgtcaccccgggcagtacatcacgacgatcctggtcgggaataatatcgccctggttatctattcgctctatatgtcgctgttgttgcgctcgctcgcggcggcagtgggttggacggagatcgctcgcggcgggtccgtcgttctggaaacggcggtttcgacaatcatcatcatcttcgtcgccgaatttctcccgaaatccgttttccggaacagcccgaatttttattaccgcctgtttgctcctgcgatctatttcttttatctgctgctttttccgatcgccaagctgacgacctggatttcccaggggattttgtggctgatggggcgtaagccgaaggttgcgatgatggagcccattttcgaccggaccgatctggccagcttgttcgaatcggggaagccggaggcgcagcatgaaccggataatgagatcaaactctttcagaatgccctggattttgccgatttgcgcgtgagggattgcatggttccccgtatcgatatggaggcggtcgatatcgatgatacctcgatcaaagcgcttacggcgcgttttgtcgagagtaagtattcccgtattttcgtctggaaagagagtgtcgataatatcgtcggctatgtcaattcgaagtcgctgttccggcatccgacgtcgatcgatgaggtgctgatggaggtgcaatacgtcccggagacgatgccgttgcaagcactcatgcagcggctcatccgtcataagagcaatattgcggtcgtgatcgacgagttcggcggtacggccggtattatctctttggaggatgttctggagcagattttcggcgaaatcgaagacgagcacgatgtgcccgaccttacggagaaacaggtcggcgattcggaatttgtcctttcgtgccgattggaagtggaatatctcaatgaaaaatacgggcttgccatacccgagagtgacgagtacgaaacgctggccgggtatatcattttccggtatgaagggctgccggcggccggagaaaccgtgcgtttcgagcatcttgagatcaagattctgcgcaggacccgttcccggttggagttggcgcgcgtgaaacggttgtagtttacgggatattttcgaccggtgaggggcaagtgcgttttttcgatatgccggatgcggaaaatgacgaaagaatttggtcgtttatcatggttttcagaatatatttattatctttgaacactcattttgaaacaataaattaaaatagtttatatggcaagtttaaacacgttacggaccagattcggtgtggttttgtcgattatcatcgcgtttgcactgctggcattcattctctcgcttaaaacggatatgggactttcgggtaacgaccccaaggtcggtgtgatcgacggttcgaagatcagatattcggaatatattgaggtatacaacaacctgaaagaccagagcaacatctccgaaagtaatgaagagcagatggatcagttggctgaaatggcttggcagactctgattgccaaccacgtgtacttgcccggtttcgagaagatgggaatctcggtgaccgatgccgagcgtgagggacttatcagcggcgagtattattccgggacgatggctgcggctttcaccgacccccgtacaggacagtacagtgtggagggtgtgagtgattttatcgcccaggcaaccggaaatccccagatgcaatatatgtggggggctttggtcggacaggctatgcgggagcgcgaaatcaataagtataacggcttggtcaaaggcggtgtatatgtcaatcggctggaagcggaagaaggcgtcgatgcgcagaataagactttcagcggttcttgggtcggcaagcgttatcacgatatgcctgattctctgttctcggtttccgattccgaaatcaaggcttattacaatagccataaggcccgttatgagcagaaaccttcgcgcacgctctcttatgtggtgttcgaagtggctccgagtgcagaggatatggcgactttggagaagaccgttcgggaagtcggcgatgaatttgccgcgtcggacgatccgaaagcatttgccaagaataaccgtttcggtaaaattacagacaattatcggtcggttgcccagcttctggacgatgaggccgaagcgctggccaacggcaagcagtatggtcccgtcctgaagaacgatacctggacgatgacccgtgtcgttgaaactttgaacgctccggattccgtgggcgtccgccatattgtactcacctacgaccaacgcgacctggccgacagtctgatgacggctttgcggcaaggtgcggatttcgcacaggcggctcgtacccattcgctctatatgcaggatgccggaaatggaggcgatgcgggcgtgatgcctttctctgcattcccggacgagctttcgggacttctttcgacggctaagcagggggatattctccgtgtcgaagtgggtgacgttattcagattttacaggtttatcgtctggacaaaccttcgaagcacatgcgccttgcgacgatcacttatcctgttgaggcttcgtcggcgacccgtcgcaatgtgcatagtcaggcaagtcttttctctgtcgagggcaagggttctgtcgatgcgttcaacgaggcagcgaataagggaaacctcactcctcgtgaagcgaaactcacgcagggtgaccgtctgctgcagggactggctgattcgcgtgaattggtgcgctgggcatacgatgccaaggtgggcgcgatttccgagattttccctgtgggtgatgactatgtggtcgcagtggtaactgagatcgacaatgaggattatacgccgatcgagaaagtagcgaacaatattcgccagacgcttataaccgataagaagtttgaaaagatcgtcagcgaaatgaagggttcgactatcgaagaggtcgcccaaaaccttggtaccgaagtcgttcctttcgaagatgtccgttacggatcgttctttatccgtaacatgggtgtcgagcctcgtgtgatcggagcgattaccgcaacggagcagacgaatacgctgtccgagccggtcaagggaaatgtaggtgcttatgttttcgtggtgacggatattcaggaggcggaaactccgcagagtatcgaagctgaaaaggtacgtgccgaggcgtcgtcgcaggggatgattcagcgtcgtctgttcgatttcttggagcagatgtcgaatgtggaggacttgcgcggcaagtatttttaaccgttaccggtagattttttccggaatagttccggccgaaaaagagggatgtagcttatacattcctcttttttattgtcgttattgcgatggcatagggggatgacttctcttcttaaaagcgataagagccggtttcctgaattctcttctgtgaggtgctcggagtggtagtccggccaatccgccattctctttttccgcatcttcgaaatgtccgtgattttatcgtatattccggaagtctttggggctgggggaggagaacgacggtctcggcagtcgagtttctttccggataggtgtttgcggtatgaaatcggctgttttcgagagtcggggagggaggatattcgctgtctgtctaacgggaaatatggcctacaaacataatttgtagggtttgtggaaatggcactgtgacagcatgtattcggtcgttgtttgagatccgccgctgtatttgcgcggactctggaggtgaggccggcgatggaattatgaaggtcgatggcaaagttctttttcggtcggccggttcgcttaccccattaaaaagccccgcatcttttgatgcggggctttgataataacagaggagtgatccggattatttctgctcgtcgagcaggatctccatgatcttgatcgctgcggtcgcaatcggggtaccggggccgaagatggcggcggcaccgtcacgatacagctcatcgtaatcctgtgccgggatcacaccgccgacgatgacgatgatatcctcgcggcccagtttcttgagttcggcgatgatctgcggaacgagcgtcaggtggccggcggccagcgacgatacgcccactacgtgaacatcgttctcgacagcctgtttggctgcctcctcgggagtctggaacaacggacccatatcgacatcgaagccgatgtcggcgtaaccggtcgcaacgactttggcgccacgatcgtgtccgtcctgaccgagtttggcgatcatgatgcgcggctggcggccctccttcttcgcgaatttggcaaccagttccttcgcgtgttcgaatgcgggatctgatttcacttctgaactatatacacctgaaatggaacgaataactgctttgtaacgtcctacgaccacctcgcaggcatccgaaatctcgcccagcgaagcgcgtaccttggcggcctcgatagcgagttccagcaggttgcccttgccggtcttgacgcattcggtgatggcctcgagcgccttcttcacggctgcttcgtcgcggttcgcacgcaactccttcagacgcttgatctggctctcgcgtacggccgtgttgtccacagccagaatatcgatcggtgcttcgtgatccagacggtattcgtttacgccgatgatcttctcgatgcccgagtcgatgcgggcctgcttgcgggctgccgcctcctcgatacgcatcttcggaataccggtttcgatggccttggccataccgcccagtttctcgacctcctcgatacgctcccaagccttgtgagcgatctcgttggtgagggtttcgatgtaataggaacctgcccagggatccacttcgcggcagacgttggtttcctcctgaatgtagatctgggtgttacgggcgatacgtgccgagaagtccgtcggcaaggcgatcgcctcgtccagtgcgttggtgtgcagcgactgggtgtggcccagagcggcacccatcgcctcgatagccgtgcgggctacgttgttgaacggatcctgctcggtgagcgaccagcccgaggtctggctatgcgtacgcagggccaacgatttcgggttcttggggttgaattttttgacgattttcgcccagagcatacgtgccgcacgcatcttggcgatctccatgaagtggttcataccgatcgcccagaagaacgacagacggggtgcgaaagcatccaccgacataccggctgcaacgcccgcacgcaggtactccagaccgtcggccagcgtgtaggccaactcgatgtcggccgtggcgcctgcctcctgcatatggtagccggagatcgaaatcgagttgaacttcggcatgttcttcgaggtgtattcgaagatgtcggcgatgatcttcatcgagaatttcggcggataaatataggtattgcgcaccatgaactccttgaggatgtcgttctggatcgtacccgacagttgatcgagggtgcatccctgctccagaccggtcacgatgtagaacgccaggatcggcagcacggcgccgttcatggtcatcgacaccgacatccgatccagcggaataccgttgaagagcaccttcatatcttctaccgagcagatcgacacgccggccttaccgacgtcgcccactacgcgcgggtgatcggcgtcgtagccgcggtgtgtcgccaggtcgaatgccaccgacagacccttctgtccggcagccaggttgcggcgatagaatgcgttggactcttcggccgtcgagaaaccggcgtattggcggatggtccagggacgcatcacgtacatcgtcgagtaggggccgcggaggaacggtgcgatacctgccgcatagttcaggtgctccatctcctccagatcctttgccgagtaggagcccttgacaggtatctgctcggcagtcagccacggttcggtttggccgcagcctttcgaagcgcagcagctcttctgctcgcctccgtcatatgttaaatctgaaaattttgctctcatgacttttgctttttagatacccatttctttgaggtagaacttcagtgtttcgagtacgttgctcttgacgttgatgaaattcttgatgccctgggcttccagttcgggcatacatgccggagcgcccgcaaccacgaggatcgccttgtcgccgagcagctctttcactttaggagccgcctctgcgtagtcgtcgtccgatgcgcagactacgacgatctcggctttcgattccagagcggccttgacgccctcttcgatcgatttgaagaacgtgttgtcgattactttgatgccggcgcatgcgaagaagttgcaggagaactgggcacgggcacgggccatagccaggctgccgcaggtcagcatgaacgccttgggcgccttgccgctgcggtccacgtgcagacgcatggcttcgaatgccatggaaccacggtagggagccagcgtgttgccttcgctcacggggcgggttacggcggcttcggtcagctccttgccggcgacctccgtaaagttggggtattggttggcgcccagcaggatttcgcggcgcgttgcgatgttcttgtccttggctgcggccgatgccttgacgcgctctacgatgaagccgctttcataggctgcggtgtagccgcccttctcctcgatttcgcggaagagtttccacgcctcgttggcgatcgagtcggtgaggttttcgatgtagtacgaaccgccggccggatcgacgacctgatcgaagtgcgactcgtgtttgagcagcagttcgacgttgcgggcgatgcgcatcgaaaattcgttgggatcttcgtatgccttgttgaaaggagtcacctcgagcgagtgtacgccggcgatcgatgccgacatcgcttcggtcgtgccgcgcagcatattgacgtaggggtcgtatgccgtctggttccacgtcgaggtcacggcatgcgtgaacatcttgcagggacagttcttcgcggggttataagctttcacgatgttggcccacaacatacggcctgcacgcaatttggcgatttccatgaagtagttcgaggtgatggcctgcgagaaacggatctttttagcggcctcttcgatcgtgaagcccatatccatcaggcgtaccaggtagtcgtgaccggcagcgagcgagaaggcgagcgcctctacgatcgtcgagccggcgttgctgaagatttcgcccgataccgtgattacgcggatacctttgtaggttttggttttccgaaccaggtcggcgatcttctcgaaacatttggcaccgttctccgaacagaagctgcctttcgaagtcagtttcttgaccagcgggtcgatgcagaaattgatgtgcacctcttccgcaggcagttgttccttttcgatctttgcgatcaccaactctgccacatgggcggttttactgccgctgaaggtaatttcgactgcagggatgtgaatatccttgagcagcgtattcagatcttctgcggagaaggtctccggaacgatctggaattcgatcgaatcgacgcccgcattgaggatcttgagcgcgacggcgttcgcctccttgggacaattgacgatgaccgtctggtggatcttccagcggttgtgggcacgggtgccccgcacgtaggggaaaaccccggcttcggagccgaggaacttcagtccggcgaggttttcagcccggtagtagggacggacgttgaaaccttccggcgttttccacaccaatttacgctcgtagtccgcacctttgaggtcggccttgattacctcctcccactgctcggtcgaaaccggcggaaattcggtaaacaacttttcacgtttggtagttgccataataaattagagattagtattgaaatatgttcaattgcttttaaactgcccgtaaagatataaaataattgccggattgtaagcaagaaatgcggaaaatagccggtttgtaccaacgaaggctcttttcggcggaggttttggaaatgcccggatcatgaatggggcgatttttcgaaaaaatgctattttccggaaaataatgtctgaaatcgaccggtatgacgaatttttaggctgttttttcgggaaaagttgtttttttattggttttttcgaaaaatattcgatttttttctggaagatgcggttttttgtgcgtttttgtcgtgtcggatatttatctttgtgcgcagaaaggatgccgtccgtcacccgggcggaagtgtacgggttttacggtattccgagttcataattcgaagtgatcccatgtcattgctccgattcaaaatggtggaggcggccatcgatcacaaagccgtcgaagtgaaggctcccgagggaagtccttccgagtatttcggtacgaaggtattcggccgcgaggccatgcgccggtatctcaacaagacggtttatgcccaactgctcgatacgatgcagcgggggacgccgctgacgctcgaagtcgccgacggcgtggctgccggaatgcgccagtgggcgctcgaccacggcgccgaccactatacgcattggtttcagcctctcacgggcggtacggccgagaagcacgacgcctttgccgagccggacggctgcgggggtgtactcgacgaattttccggaaggtgcttgtccagcaggagcccgatgcgtcgtcgtttccgaacggcggtatccgtaatacgttcgaggcacggggttattcggcgtgggaccctacctcgccggccttcatcgtgggcggtacgctctgcatcccgaccgtcttcatcgcctatacgggcgaggcgctcgattataaagtgcctctgctacggtcgatttcggccgtgaacaaggctgcgaccgaggtgtgccgctatttcgacaaggaggtgaaccgggtgattcagtatctgggctgggagcaggaatatttcttggtggacgaaagtctttgggccgtacgtcccgacctgatgctgacgggccgtacgctcatggggcatgaatcggccaagaaccagcagttggaagatcactatttcggggcgatccccacgcgggtcatcgctttcatggccgatctcgaatacgaatgcctgaagctgggcattccggtcaagacccgtcacaacgaggtggctcccaatcagttcgaactggctcccgtgtacgaggagtgcaacctggccaacgaccacaaccagctgttgatgaccatcatggacaagatcgcccgccgtcataatttccgggtgttgctgcatgaaaaacctttcaagggaatcaacggttcgggcaaacacaacaactggtcgctgggaaccgatacgggcgtcaatctgctcagtccgggtaaaaccgcatcggagaatttgcagttcattaccttcctggtgaatgtgatttcggccgggcacaagcataacggcctgctgaaggcggctatcatgagcgccaccaactcccaccgcctgggggccaacgaagcgcctccggcgattatttcgaccttcctcggtacgcaggtttcggccgtgctggataaactcgaggccagccgcagcgattcggcgatccgcttcaatgccaagaacgtcttcaagatgagcggcatttcgcatattccggctttgttgcgggacaataccgaccgcaaccgcacttcggctttcgcgtttaccggcaaccgtttcgagttgcgtgccgtcggttcttcggacaattgcgccgaggcgatgatcgtgctcaataccgcagtggcggacgagtttacggcgttccgcgagcgcgtggatgcgcgtatcgaggccggagtcaggaaggaaaaggcgatttacgaggagctcaagagtatgatccgctcttcgcgggcgatccgtttcgacggcaacggctattcggaggagtggcgggccgaagcggcacgccgggggctcgattgcgaaacctgtgcgccgcgtgtattcgaccgctacctcgatccttcgtcggtcgagatgttcgcccgcatgggcgtactctcgaaggtggagctcgaagcccgaaccgaagtgaagtgggaaacctataccaaaaagattcagatcgaaggccgcgtgttgggcgacctgacgatgaaccacatcgtgccgatcgcttcgcgttacgaagctctgctgctggataaggtctataagatttcgcaaatcggacaggggctcgacgcttcggccgatgtcgaactcatcaaacgtattcagcagcatacggctctgatccagcaactgacccacgatatgatcgaagcccgcaaggtggccaacaagatcgaggatcagcgggagaaggcgctcgcgtaccacgatacggtggcggtctatttcgaccagatccgcaaacacgtggatcgcctggaggagatcgtggacgaccagatgtggccgctgcccaagtaccgggagctgctgttcctgcggtagttgcttcggcttgccgcttctgcgggcgggaacgataatcgggataatccggcggattcgccggattattttttaactttgtatgcctcgaaaacttcggagcagaatcaatgtaaggatttatgtatcgcaacctgagtgaatttatcgcccgcctggagcgggaaggcgaattgcagcgcgtgagcgtgccggtggatccggtgtatgagatcgccgagattaccgaccgcatgtccaagcagccggacggcggcaaggcgctgttgttcgagcagacggggacgccgtttcccgtgctgaccaatatgatgggttccgaccgtcggatggcgatggcgctcggcgtggagtcgctcgacgaactgacgcgacggctcgatgatttgttgcagcaggccgtcacgccgaaaaattcgctcctggataaattgcggatgctgcctttgctggccgagatgtcgcgctggttgccgcgtacctcgtcgtcgcggggcgaatgtcagcaggtcgtgctgcagggggaggaggcgtcgctcgatgcgctgccggtgctcaagtgctggccgtgcgacggcggacgcttcgtgacgctgccgctggtgcacaccctcgatcccgaaacgggaatccgcaacgtgggcatgtaccggctgcaactgtttgatgcccgcacgacgggcatgcactggcacctgcacaagaccggagcccgtcattacgaaggttacaggcgtgccgggcggcgaatgcccgtgtcggtagcgctgggcggcgatccggcttatacttatgctgcgacggctccgatgccggacaacatggacgaatacctgctggcagggtttctgcgccggcgcccggtgaaactggtgaagtgtatcaccaacgatatttatgtgccggccgactgcgatttcgtgatcgaagggtatgtcgatccgtcggagccgaagacggtggaagggcctttcggcgaccatacgggtttttactcgctgaccgatgaatatccccgcttccatgtgacggccgtcacgcggcggcgcgatgccgtttatcctgcgacgctggtgggcattcctccgcaggaggacgcctatatcgccaaggccaccgagaagattttcctggctccgatccggctggccgtacagcccgaagtgaaggagctgacgatgcctgttttcggtacggcgcacaatttggccgtggtgtcgatcgacagacgctaccggggacaagcccataaagtagcgcagggactttggggggccgggcagatgatgttcaataaatacctcgtcattacgggcgaggattgcgacgtgcatgatccggaccggttggccgccttgttgcgccgggccgagttcccgcgcgatttgattgtaagcgagggagtttacgacgtactcgaccatgcgaccgcgacgcccgggttcggcggtaaactggcgttcgacctgacggagatcgatccgtccgctccagcggaggccgttcggcttccggagcggttcgagctgacgcccggtctggtcgaggtcgcggacggacttgccgggaagtggggggccttgctgctctttgccgacgatacggtggaacagaagccggatctggccgctttccttgcccgaaatccgtgccgggggattcgctatgtcgttcttttcgacggacacgcccggacgctgcgcccggacgagctgctgtggctcgctgcggccaataccgatccccggcgggatgtggagtgccgcgacggtgtgctgtgcgcggatgcccggagcaagcggcccggcattgcgggcaacccttcgcgttttcccaatgtggtgacttcgctgcccgaggtcgttcggaaggtggacgaacgttgggcggagtatggtttgggtgagcggctcgaatcgccttccgaccgttaccggacgttgttgttgtccgacaaagctgcgtggtagaggatggccggacttttccagacgcgtgagcgccgggcgctcgtggtgttcctcctgctggcgggagtgttcgtcgccggactgctcctggccgaacggcgggagagcgcggtatctgccgaccgggcagaggcggagatggaagcgacggttgcggcggactccgtgaggctgttcgagttcgatcccaatacggtggagtatgccgatctgcggcggctgggactcacctcccgcatggcggtcagcctgctgaagtaccgcgcagcgggcaaagtgtttcggatccccgaggatgtggctacctgctacggcatgaccgattcggtctattttattctggaaccctatattcggatcggacgcgagtatgcgttgacaccttctccgcgtcgggaatatcgggagtatgtcccgcaggagccgaggatgatcgtgccccgcgaacgattcaggatcgatacggtgtccgcatcctatctcgcgtcgctcggtttttccgtccgtcaggccgaggccattgtccgttatcgggatctttacgaaggtcttcgggatgaagcgggttttcgggcttgctatatgatcgccgattcggtggccgatcttttgctcccttatgtaatttttccggaaccggagcccgttcgctccggattgatcgagctcaacggggccgattcggcgaccttacgctcggtagttgggatcggtgagaagagcgtcatggccattattcgatacagggagcggctcggcggattttacagcgtggatcagttggccgaggttccgcaggtcacggagtccaatttcgagcggatcgtgaaacaaatttactgcgatagtttcaaaattcgaaaaattgatattaactttgcacctccgagtacgctcaaggggcatccttatttgccgcccgccgtatttaggaagttatttagtaaaagacaattgaaaggaggttggagtaccgtcgaagagttggttgaagagcacatattaaccccgcgtgaggccgagcgattggccccgtatcttcggtttacggtacgagaagcctcgaaagacataccgaacggggagtcggcgtcgtccggatggagtcccgccccgatacaagacacgatccattagaaattagagtaaaaaacaataaaaaaagcaacgaattatgattatcatgccggtaaaagagggcgagaacatcgagaaggccctcaagaaattcaaacgtaaatacgagcgtacgggtgttctgaaggagcttcgtcgtcgccagtatttcaccaaaccttcggttgcgaagcgtatcgccatgcagcatgccatttacgtagagaagctgcaccgcgacgaggaataggaagatttttccatatcttaatcctgataatagacaagaattttttatcttgtctattatttttttgttgttttacagcgggttgctctctgtttctcctgcaaaactaaattttttagtttgaaaactataaaaaatagttgtatgtgaaatttttttagttatctttgtttcagaagatttttgtgcaggagccggcaatgcggagctgtgctgccgtttgtgcaggtcctgtttcgttcgactttaaccgacattgattatggaaaagctgacacctagagaagaggagctgatgcgttgtttctggacgcggggcccgttattcgtgcgcgaactggttgcgctctggcccgaaccgaaacctcatttcaatacgttatcgacgatggtgcgtggcctcgaggcgaaagggtacgtcggacacaaggcctatggcggcacctaccagtattatccgctcgtcagcgaggaggagttcagccgcaagacgctgaagggcgtggtgagcaagtatttcgacaattcctacctcggggtggtttcgtcgctcgtacgggaggagaaaatctccgtggacgatctgcgcgacctgatccggcaaatcgaaagtcaaaccgaaaaacgatagtcctatgccgacctttctgctttacagtctgaaggctgcgggatgcctggcggtcttctacctgttttacaagttgttgttgagccgcgatacgctgcatcggatgaacagggtgttgttgtgcggagtgttgctgctgtcgtttttgctgcctttgtgcgtaattaccgtcgagaaggagttgcccggggtatccgccgctgggatcgacgtgattccggaaaattatttccggcgggacatggtattcgaaaaccgaatccccgacgatacccgggacctgatgataacagaggagccggagcctgctcccgaaccgttcgactggggcgttttgctcggaatcatctattttgcaggggtatttgcgacgttgggatggaccgtatgcaacatcgtgcgggttgtgcgaatgacgcgccgcggccagcgcataccgcttggaaacgggagcgttttggtgttgtcggaccggattcgagctccgttcagttggatgagatacgtggtgatgtccgaggaggattatgcctgcggcggagggacgatcctcgtgcatgaacaggcgcatcagcggttgggccattcgtgggacctgctgctggtcgatttgctggggtgtttgcagtggttcaaccccgcgatgtggctgttgcgtgtggaactgcgtgctgtgcacgagtacgaggccgacgagcaggtgctccgctgcggggtcgatgcgaaagattatcagatgctgttgataaaaaaggccgttggcgggaggtggtactcaattgccaacagccttaatcatagtaaccttaaaaaccgaattaccatgatgttgcgtaaaagatcatcgaggtgggccagggccaaggcgctctatgtcctgccgcttgcgtgcctggcgctcggcgctttcgcacagacctcctatgttcttccggaggacaaaactacgaaaaattccggaaacggtgaaatgcctcttcctgctggtgcggacggcctcacagtcggtacaccggaagggggaatgccaccggtcgaaggctccatggccgaattgctcgctaatctcgagcgtaccgctctcgaaaagcaaacggcagaatcgggggcgcacacctttaccggacgcgtatttggccgggacgataagccttgggccggttatgagtttatttgcagcggcggccggcgggttgtgaccgatgcggagggccgctttacgatcgttacggagaagccgatcgtttgttaccttgtcggaggggagacggatcagaaagtaaaatcagtcggtagccgcttcggaattccgatggggacggacattgccttggaatttcatttgaaagagtcgcttgctctgacccacctgcccgtatccgatgaaccggtagtgtatgcggtttatggcgatccggcagattttcgcttcgatccggaacatccgcctctgataatggacgggggcgaggaattgtcggctgaaacgctggatacctatttggggttgccggaacagaagatgattggtgcttggatggtcaaagggccggaggcactgaagggatacggtacgcgggcggcgaacggagtgttgtcgattagggttcagacctatccttatacggagtcttggagtccggccgatccgtccttgtgggatccggaggatttggagctttatctggtgtgggaaggggatgagttgcccgaacagtttgtcgcccgccgcgatgcgtacatgaaagaggagtttgccaagttgctgactgctgatgccgggaaactcgaacgactcgggtataaatcggtcgatggtgcggaagagtgggtgactgtcgaggtgagcgacggggctgccctcattcctttctggattgatctgtcggacgagggcttgtatctgctcgacggtgaggagatcgattacagacagttgggcgcgatgtcaccgtcgagtatcgccacggcgacccgaatgacctccggcgaggcacgcagacgctacggcgatcggggtcgttacggtgcgatcgtctatacgagtcgtccggagtcggaacgtgtgacaatcgaagagaaacagaagccttccgatttgtatcactatattacgggcgattttgaaccgacgggtgtgcccgatacttaccgggtgcggcggatcgagtttagccattcgatgccgttcgaattccggccattggtactgtggaatggcaaggtgtcgaatatctatctttttactactcccggtatcgttcacgagatagaaaccgttcggatcgtaaccgagccggacgaagcgacggtcgccagatacggcgtatcggcccggaacggggtgatcgaggtcgtttccaaaacggcttcgcgtgaggatgatttcgaggtgaccgtttatgataaatacaacaatccgatgcgttatctgaagggtagtttccgatcggtggatggtaaaaatacctataaggtgagcggattgaaattgcggaacgtgcagggagtacgtcccggaatgttgccgttggtagctgtggacgggcgtgtggggtccatcaccgatctggagaagattcctgcccgcaagatcgaaaccatacagattttttcctgggaggatgtattccgtgacccggcattagtcgagcgttacggggatgccgcccgtgtcggagcgattcttgtgacgactcgtgatgctgcgaaacaggccgaaaaagaggcccggaagtccggtgcaggtgaatctgtcgtcgcatccgtaccggagggaccgtcgttcggtacggttcagaccggtaatactccggtggacgggcaggtcaaggtgcggatttccgaagttgctgtgccgaacgattcgctcgtggtttccggtcacgatttgagttcgatgctcttcctgctcgatggcagaagagtcgcagttgccgaggtaaaggctttgaatgaagcggagatcgaatcgatgtcggtcttgaaggatgaatgggctgtcgaacgttacggcgaggcggcggcggatggcgtggtttatgtgacgacgaccgaaggtgcccggcagttcggccgtttggagtgtagttttgagcatggaaactctttccaggaaggtcctggtttttatcggatcaaggatacgggaaacggatttgcgatccgtccgctcaatggagcccgaccgcttgtgttgatcaacggccggcaggtcgatgatgattatttgaagtcgatcgatgcggggaaggttctgtgggttcggattctgcaacccggttttgaattgttggaccgttatggcgagcgggcgtgggacggtgtgatcgagtttgggacgaatgaatccggagaacgtacgactttggcggtttattcgtcggatgcatcgggcaaacgcaataagatgacagtcgtcagggagccttccggcgcctcctcggggcactcttccgtgtctaagtctattgctacgtcggcgcagcctttggaggaagttacggtggcgacttatacggctggagtggattcggtttcgattgagaatggctctctgaagcaggtcggtttaatagtattggatggcgaggaaatttctgccgatcgcctttcgcaactggatccctcccgaatcgacgcgatgacggtattgaaaggagagcaggcggtcgaacattatggcgagaagggagcgaaaggggtgatcgagatcacgacgaaaaaaaatcggagcggcgtggccggcgaatgaatatagagaagttccaattcataagtgttattgttccgtcagggaagcatcctgcagccgcacttagttgcgggatgttttttataaaaataggagcgtcctatctgggacgctcctatttttatctccggtcgtggcgaacggattcttttcataccatacgaaaagaacattcgttcggagggtgaatcctttagtgaatccgtccttctttggcctcgatgcactcggttgcgtgaggcactttcatcagccgctccttggggatcagcttgccggtggttttgcagatgccgtatgtcttgttctcgatgcgtacgagtgccatttcgaggttgcggatgaatttcatttgatgggccgccaggcggccgctctcctctttggagagcgtagtggctccctcctccagcaccttgaacgtcggcgaggtatcctccgtatcgttcgatgcggtgtgggttatcgtggcgcgcaggagttcgtaatccgcacgtgctgtttccagttttttgagaatgagctgtttgaactcttccaattcggcgtcactgtatcgggttttttctgcttctgccatagtttcaatattttatttgtaataatgttatactaaattaaacaatattcccgttacttccaaattttttgccggaaacgtgcaggttctccttttttggtcaaattttggtcaccgcgatacggaccggttgctcatctacctccgactccacgacgaattcgccgctgggagaaggcactccttcgatttcgacagccagcgtctgcgaggcgatgtagtcggcgaaggatttgagcgcgggaaggacgaactcctgctgttcgatctccacacggattttgtccgtcacctcgaagcccgaatccttgcggatgttctggatacggttgatcaactcgcgggcgataccttcggcacgcaggtcgtcggtgatcgtgatatcgagggctacggtcagcttgccctccgtagctacgagccagcccggcatatcttccgaggtgatttcgaaatcggcaggggtgacggtgattttttcgccgtccacgtccagcagggtttccgccgatgcttcgatcgcggctatctgatcctgtgagaacccggctacgagagctgcgatctgcttcatctgtttgccgtatttgggaccgagggtcttgaagttgggcttgatgcgcttggtgatgagtcccgtcgtattttcgatcagttctatttccttgacattcacttcgctcataatgagccccttgacggcttcgatgcggcgtgcggtgtcggcgtcgaggaccggaatgagtatcttcgtgagcggctggcggactttgatgttcaccttgcggcgcagggccagtaccatcgacgaaacctgttgggccatagacatcatctgctccaattcaccgtcgatgagcgaggagtcgcagacggggaaggtcgaaagatgtaccgactcgtccgtgtggcgaccgcttacggcgttcagatcgcggaagatacggtcggagatgaacggcgcgaacggtgcggagagcatcgaaacggtttccagacaggtgtagagcgtctggtaggctgccagtttgtcgcgtgtcagaccgccgccccagaaccgcttgcggttgaggcgcacgtaccagttcgacaggttttcgcatacgaattcctggatcatacgggccgccggcgtcggatcgtaattctcgagcgattcggtgacgttccggaccagcgtattgagcagggagatgatccagcggtcgatctccgggcgttcgctcatcggaacttccggctcctgtcccgtaaaaccgtccacattggcgtagagggcgaagaacgagtaggtattgtagagcgtgccgaagaacttgcggcgcacttcgtccacgccgtcccggtcgaacttgaggttgtcccagggctgcgagttggagatcatgtaccaacgcgtcgcgtcggcgccgtaggtcgaaagtatttcgaagggatccacggcattgcccaggcgcttggacattttgttgccgttcttgtcgagcaccaggccgttcgaaatgatgttcttgaaggccaccgagtcgaagagcatcgtggcgatggcatgcagcgtgaagaaccatccgcgcgtctgatcgacgccttcggcgatgaaatcggccggatagacgctcttgaagtagtcgccgccgtgctcgaaggggtagtgtagctgggcataaggcatggcgcccgagtcgaaccacacgtcgatcagatccggttcgcgccgcatcggttcgcctttggacgaaaccagcacgatattgtccacgtaaggacggtgcaggtcgatccggtcggtcgagtagttctctttggagaggtcgcccggcttgaagttcttgtagggattctccttcatcagacttgccgcgacggatttttcgatttcggcgacgagctcttcgaccgagccgatgcacttcatttccgagtaatcctccgtagcccagatcggcagcggcgtgccccagaagcgcgagcgcgagaggttccagtccaccagaccttcgagccacttgccgaagcgtcccgttccggtcgattccggcttccagcggatcgtcttgttgagttcgatcatccggtcgcgcagcgccgtagttcggatgaaccaggagtcgagcgggtagtagagcaccggtttgtccgtacgccagcagtgggggtaggagtgggtgtgcttttcgatcttgaaaaccttgttctcggccttgagcatcactgagagatcgacgtcgagcgtcggcgcgtcggcggcgagcgaatcgtcgtaggcgtttttcacgtaacggcccgcccattgggaataggccgctgtatcgacgttgtcgcgtatgaaggtcgggtcgagctcttcgagcaggaagaaccgtcccttgcgatcgaccatcggctgattcttgcccgccttatcgaccataaacagcggggcgatgcctgcggcgcgggccacgcggtcgtcgtccgcaccgaacgtcggggcgatatgcacgatacccgtaccgtcggaggtggtcacgtagtcgcccaggatgacgcggaacgcatcgcccgcaggcttcacccaggggatgagctgttcgtagcggatgccttcgaagtccggacccttgtaggtgaccggagagatttcgaacttgccctccatcttgggggtaaaatacgaccccagcagttctttggccaggatgacagtctggggggcatccgtatagggattgcggcatttgacgcgcacgtattcgatttcggggcctacggccagcgcggtattcgacggcagtgtccagggcgtggtggtccaagccaggaagtagagatcgccttcggctccgtcgaagagtttttcgctccgctcgtcgcggatgattttgaactgcgccgtgcaggtggtatccttcacgtcgcggtagcagcccggctggttcagctcgtgggtcgaaagtcccgtgccggcggccggcgagtagggctggatggtgtaacctttgtagagtagccccttgtcgaagagctgtttcagaagccaccagagggtttcgatgtatttgttgtcgtaagtgatgtaggggtcgtccatattgacccaataacccattttgcgcgtgagttcttcccacaggcccgtgtactccatcaccgcctcgcggcaggcgcggttgtactcctctatggagattgtgcgcccgatgtcctccttggtgatgccgagtttcttttcgacgcctaactctacaggcagtccgtgcgtgtcccatccggccttgcggtgaacgaggtaaccttgctgcgtcttgtaacggcagaagatatccttgatcgtgcgggccatgacgtgatggatgcccggcgtgccgttggctgagggaggtccttcgtaaaagacgaaggtgggatgaccctcgcgggtggagatgcttttgtggaacgtgtcctgtgcgtcccactctttcagtacgtcggcggccaaccccggcagatcgaggcctttatattctttgaacttcatatcctgttgttttcaatcgtcgttttcatgggctggcagaatccgatccggcccgattccgccggacagccccgaatgcggagctgttacctgtctttgtcgtattcggcagcgccggaattcgctgtgtgccgcctgtttcgtgcgggaagccggcggcggattttaccaacatgcaaagttacgaaaaaatatgaataaataaatccccggaaacagttttttatcgaggggcaacgagttgtggaggaagccgttgcacgatttcctcgaaagatttttggaagtagtggatttattcgtcggttgcggtgcggataacgcgggccgggttgccggcagcgaccgaatcgtcgggaatgtcatgcgtgaccacgctgccggcgccgatgacgcagcggcagcctatcttgacgcccggacagacgatcacgccgccgcccagccagcagtcgtcgccgatttcgatgcccgctcccttttctttgcccgtagcccgttccgcagcgttcatcggatgcacggccgtcagaagttgtacgccgggacctatcaggcagcgttgtcccaggcgaatcggcccgaggtcgagaaaaacgcagttgaaattgacgtaggaccctttgccgatggagatattgtatccgtaatcgcagtggaaaggggcgcggatcatggcttcgaccctcggacagagttcccggagcgttgccagataggtcgcgtccttgtctttgagcgcgacgttgagccgatgggtgaggtggcgggccctggcacgatcgcgtacgagttcctcgtcatttggggaaaaccactccccggcctgcattttctccttttcggtcatgggaatcggcttttagtcgaagctctgcatctcgatcaacttggcgtagatgccgtttttggccatcaactccgagtgtgtgccctgttccgcgatccgaccccgttcgatgacgatgattttgtcggcgttgtggatggtcgagaggcggtgggcgatcacgatcgatgtgcggccttgcaacagggagttaagggcgtcctgcacaagtttttcgctctcggtgtcgagggccgaagtcgcttcgtcgaggatcaggatttcgggattcttgagtacggctcgggcgatgctcaggcgctggcgctgaccgcccgagagtttggcgccccggtcgccgatgttggtgtcgtagcccgacggacactccatgatgaagtcgtgggcgttggcgattttggccgcagcgacgatctcttcgtgcgtcgctccccggcgtcccatggcgatgttgttttcgatggtgtcgttgaacagcacggtatcttgcgcaacgatgctcatgtgggcacgcaggctctcctgcgtgtagtcgcggatcgaaaccccgtcgatcaggatgtcgccgcccgtagtgtcgtagaagcgggggatcagctcgctgagggtcgatttgccgccgcccgaaggaccgaccagagccactgtttctcctcgccggatgtcgaacgagatgccgtcgatcacctcccggctgccgtcgtaggagaagtgtacattgcggaattcgatcttctcgtgcaggccgtccaacgtcttggcgtcgggcttgtcctggatttccggttcggaatcgagcacgtcgaagatgcgctcgcctgcggcgataccctgattgatgttggcgaactggtcgatgaacgagcgcacggggcgggtgatctgcgagaatacggcgatgaagccgacgaatccgccggccgaaagcgatccgttcatgacgagcgaaccgccgaagacgatcagtaccgcgacggccgtcaggccgaggaattcgctcatcggcgaggctagttgctggcggcgggccatcgagagcatcaggcgcgaaaattcggcgttgaactcggagaacttgcggcggatatagtcggtggcgttgtagcttttgatgaccttgatgcccgaaagcgattcgtcgagcacgcttaccatgtcgcccatgcgttcctgccctttgagggccgggtggcgcagttttttgacgatccgtccgatgatgagcgccactacgggcaggaacaggatggcgaacagggacaactgccacgatacgaggagcatgtagatcacgtaaccgataataagcagcggatcgcggaaggcgacttgcagcgtattggtgatgcagtactggaccaccatgacgtcctgtgtgatgcgcgacatgagatcgcccttgcgctgatcgctgaaatatccggcgttcatccccatgattttgttgaacagatcgttgcgcatgcgttgcagcgacctgacacgcatgttttcgaccgtccaggcgctcatgtagcggaagaaattgctcaacaggttcattacgatcgtaccgcaggcgagcaggaggagcattttcgacatcgtgaaattcgtcccgaacagttgcgtatagacgtagctcaacatctgcgaggcgtcgatgtccgagaacgagagcccgtgcatgggaaagtcgtaaacgggttggaaaacgtaggagttcttgtcgtcgaacagcgtgttcatgatcgggaggatcatggcgtaggtgagcgtgttgaacagggcgtacagcagcgcgtaaaagaagtaggggacggcgtatttggagatcgggctgacgaatcccagcagccgcatgtatgttttgaacataaattccggatcggttattgtttcggagtaaagtaggggcaaatatagcaatttaatcaggatatgcaatccggttgtccgattttggggaaagaatgttatttttgtaacaggatagagtcataaaaaggaacaatagaccatggaaaatttcaaacagatcgatccggctgaaattaccgataattttatccgggccatcggccgggagtggatgctcgtcacggccgggaacagagaaagttgcaatacgatgaccgccagttggggtttgatcgggttcatctggggacgccccgtggcgcagttcgtgatacgtccgcagcgttatacgcgggagttcgtcgatcgggaggagagggcgaccctctcgtttttctcgcccgaatatcgtgcggctctcgaatactgcggcagtcgtaccggccgtacggaggataagatccgcaatgccggactgacggtcgcctgtacggacgacggagtgcccgcgccggccgaagcacgcctgatcctgcaatgccgcaagctctatgtcggaagaatccggcccgaagggttcgtcgatcgcagttgcgatacgaaatggtatccccagcacgattatcacgaggtctatattgccgaaatcgagcgagcttacgtgcggaagtaagttaagtagagataggagcaggaggtgagtagggcaatgccgtcccgagttcgggcggccgtgtgaccggatagttttttaaaaagtctcgggacatttcgtcgtgtttcggggctttttattctctttatatggcttactctccactgcccggaacatacccggtatcttccagcaggtgcgccctgtcgttggctgcggctacggccagttggtcgcagcggttgttttcgaccgtatcggcatgacccttgacccagacgaaacggaccttgtgacggcggtaggagcgcaggaagcgggaccatagatcggggttcttcttgccggcgaaccctttcttctcccagccgaatacccagcgtttctccacggcatcgaccacgtatttcgaatcggagtagatcgtcacgtcgctgccttcgaatttcagcatttcgagggctacgcagacggccagcagctccatgcggttgttggtcgtcaggcggtaaccctgcgacacctccttgcggaaccgtcccgatatcaggaccgctccgtaaccacccggaccgggattgcccagggccgagccgtcggtatagatggtgatttccggcatagtcgggtataaactcctctctctgctgttgtaagccggagagaggagttgaatgtttcgtgatgagttatttcaaggccgccagttgttcccgaagcgcggcgatcttggcttcggcgtcagcctgtttggtccgttcgttggccacgactttctcgggagccgacgaaacgaatctttcgttcgagagctttttttgcacgctggcgaggaatccttcgaggtattccagttcgcctgcgagttttttgcgttcggcctcgatgtcgatcatgccctccatcggtacgaagtattgcgtggtctttacgaggaatccgacggccgaaggatctttctcccgggtggtttcgatctgcgagaggttgcccattttctgcaggacgggagcgtattccgccgggtagttctcgtcggcgatcacccggagcgtcagggggtctttctgcggaatgtttttctgcttgcggacgttgcggacggccgttacgacctctttcgtcagttcgaaccggcccagcagcgcctcgtctatctcccgtgcttcgggcatgcgctggaccatgatcgactcgcctgccttgcggggtgccaggtcctgccagatctcttcggtgacgaacggcatgaaggggtgtagcagacgcagcaggtcgtcgaagaaaccgcacgtggcttccagtgtcggccggtcgatcgggcattggtaggccggtttgatcatttcgaggtaccagccgctgaagtcgtcccagaagagtttatacagattcatgaaggcttccgagatacgataggaggcgaagtccgattcgacctgacgcagcgtcttggcgagcgcttgacggaaccattcgattgccaggcggttgttttcgctttgtgccagggtgtcgtcgatcgtccagccgttgaccagtcggtaggcattccagattttgttgccgaaattgcgtccctgttcgcagagagcctcgtcgaacattacgtcgttgcccgctgaggagctcaacagcatcgctacgcgcatgccgtcggcgccgaactgggcgatcaggtcgagcggatcgggcgagttgccgagctgtttggacatcttgcggccgattttatcgcgcacgatccccgtgaaatagacgtgaccgaaaggcttctcaccccggtattcgtaaccggccatgatcatgcgggccacccagaagaagatgatgtcgggaccggttaccagatcgttggtcggatagtagtattcgatgtctttgttattcgggcggcggatgccgtcgaataccgagatgggccacagccacgacgagaaccaggtgtcgagcacgtcctcgtcctgccgcagatcggcgagcgtcagcgaggcgtcgccgctcttggcccgggctttctccagtgcctcgtctgcgttgagggccactacgtagccgccttggggcagataccaggccggaatgcgctggccccaccagagctggcgcgagatgcaccagtccttgatattctccatccagtgacggtaggtgttcttgtatttttcgggaacgagcttgatttcgtcctccagaacggcccgcgtcgccggtccggcgagcttctccatcgagaggaaccactgcatcgagagcttgggttcgatcgctacgccggtacgttcggaataacccacgttattggtgtagtcttcggttttctccaacaggccggccgcgtcgagatccttttcgatctgtttgcgcagggcgaagcgctccataccggcataaagccctaccttgtcgttgatcgtgccgtcgtcgttgaagatgtctatcgattcgagcccgtatttttcaccgagcatatagtcgttcacgtcgtgcgccggagtaaccttcagggcacccgtgccgaaagcgatgtccacgtacgtatcgcggatcacgggcaccgaccggcccaccagcgggacgatgacccgggcgtcttcgggcagccaggcgtagcgttcgtcgtcgggattgacgcagagggccgtatcgccgaggatcgtttcgggccgggtcgtggcgacgatgatcgtgcggtcggtgccttcgacccggtagcgcaggtagtagagcttgccgtgcgactctttgaacactacctcttcgtccgaaagggcggtctgggccgacgggtcccaattgaccatgcgtacgccccggtaaatcagccccttttcatagaggtcgcagaagacccgcaggacgctttcggtacgggcttcgtccatcgtgaagcaggtgcgctcccagtcgcacgaggcgcccagcttgcgcagctgttgcaggatcacgccgccgtatttctctttccagtcccaggcatgacgcaggaactcttcgcgcgagagcgacgatttctcgatcccctcggccttgagtttggccaccaccttggcttccgtggcgatcgaggcgtggtcggtgcccgggacccagcaggcgttcttgccctgcatgcgggcgtggcgcaccagtacgtcctgcaacgtgttgttgagcatatgtcccatgtggagcatacccgtgacgttgggtggcgggatgacgatcgtatagggttcccgttcatcgggttcggaatggaaaaggcggtgctccatccagtagtcgtaccatttggattcgatctcctgcggggagtatttgtcggcgatttgcatgatattgtatgcggtatttataataatttgtacaggatttgcaaagttatgaacattctgctaatatgaaataaaattaggaggaaaatcgttatctttgcaaaatctgtaattttttaaaaaaagtagatgtttttcgtactcaaaactttcccggtcaaggaaaggaggagcgaggggaaagcggtcggggtcgggagtttccgaagggagaatttatccgacgatacggaaaacacttcgatttttagccacataataaaaagaatatgagtaagaaggataaaataaagaatatcgacatggacgatctgaaggcactgcccgatgtcctggacggacgccatcacgtcattcccatcgtaacgggcggggacgaggtgttggaagaggtcaacgtgcccgaaatattgccgatattgaccttgcgcagttcggtgctgtttcccggagcgatcacgccgattacggtcggccgagagaagagcatccggctggtgcgcgaagtgaacgagcgcaacggattgctgggggccgtgctgcaacgcgaaagcgaagtcgaagatccggcgccggacgatatgtacaaggtcggcactgcggctcgtattatcaagattctggagatgcccaacggcaacctgacggtgattctaaacggactggagaaaatcgaggtgaaggagtatgtctccacggaaccttatttccaggccagcgtgacgccgttgcgcgactcttctcccgatgtaaagagcctggagttcgaggctctcgtggattcgatccgcgacattgcgctgggtatcatcgctatttcgccggacatgcccaaggaggcggcgttcgccatcaagaatatcgactccaagcggggaatcatcaacttcatctgttcgaacctcgagctttcggacgaagaccgccagtcgctgctggagtctcccggtctgctggcccgtgcccgcaagttgttggagattctggtgcgcgagcagcagctcgtcgagctgaagaacgagatccagagccgtgtcaagcaggagatcgacaagcagcagcgcgattactacctgcagcagcagatgcgcacgattcaggacgagctgggcgaaggtgccgacagcgagctggagggattgcgcgagaaggcgtccaagaagaactggcccaaggaggtggccgaacttttcgagaaggagatcaccaagctcgaacggctcaatcccgccgtggccgaatattcggtgcaagttacctatctgcaactgatgctcgagctgccctggaacgatgtgacgcaggataatctcgatctgaaatgcgcacgcgagcagctcgaccacgaccatttcgggctggacgaagtgaaagagcgtctgttggagcatttggccgtcatcaagctgaaaggcgacttgaaatccccgatcctctgtctgtacggccctccgggcgtaggcaagacctcgctgggcaagtccgtggcggcggcgctgggacgtaagttcggccgtatttcgctgggcggtctgcacgacgaggccgagatacgcggtcaccgccgcacctacatcggggcgatgccgggccggatcatccagaccatcaaacgctgcgggtcgtccaatccggtcatcatcctcgacgaggtggacaaggtgaccgtaagcaatcacggcgacccgtcgagcgcactgctcgaagtgctcgatcctgaacagaatacgacattccacgacaactacctcgatacggagtacgacctttcgaaagtgcttttcatcgccacggccaacaacatcggcaacatcaatccggcgctgcgcgaccgtatggagatgattaacattccgggctacattctcgaagagaaggtgcggatcggcctcgaccacctgctgcccaagcagatgacggcgcacggcattcccgaggggcaactggtgctgactcccgaggtcgtcgagcaggtcattgcgggctatacccgcgagtcgggtgtccgttcgctggacaagcacttggcgaagatcgcccgctaccgggccaagcagatcgctttcgaggaggcttatacgccggagcttacgcaggccgatgtcgagaagattctcggcatcccgaaattcctgcgcgaagagtacgaggtcggggatatggtcggcgtagtcaccggcctggcttggaccgaggtcggcggcgatatcctctacatcgagtcggtgctgacccccggcaagggcaaagtgagcctgacgggtaacctgggtgaggtgatgaaggagtcggcgacgatcgcccacgagtgggtgatggcgcaccacaaggagttgggtatcgatcccgaaatgttcgagaagaacgacatcaacatccacgtaccggagggagccattcccaaggacggtccttcggcgggtatcacgatggtcacctcgatcgtttcgacctatacggggcgcaaggtgcgcgagcgtatcgccatgaccggagagacgaccctgcggggacgtgtaatgccggtaggcggtatcaaggagaagatcctggcggccaagcgtgccggtatcaaggagctgatcctttcggaagacaaccgcaaggacatctcggagatcaaggcggagtacatcgacggtctgacgttccactacgtgcggacgaacgaggatgtgttgcgtttggctctcgaggagaagaaataatccgtgttaatttgaaaagcgggacgcaatgtcccgcttttttcgtattttagcgacttgaaacagatagagtcacgagttatggagtttgttgcgatcattcccgcccgctatgcatcgacccgcttcccgggcaagccgctggcgatgctcgggggaaagcccgtcatccgccgggtgtatgaacaggtgaccggcgtgctgcccgatgcggtcgtggcgaccgacgacgaacggatcctgcgtgccgtcgaggagttcggcggtcgtgccgtgatgacttcgtccgagcaccgcagcggcaccgaccgttgctgggaggcttatggaaagctcggccgggagtacgacgccgtaatcaacgtgcagggcgacgagccttttatccgtccggaacagcttcgggcgatcatgcgctgcttcgacgtgccgggtacggacatcgctaccctggtgcgtcccttcgccgagtcagacggactggcggcgctcgaaaatcccaattcgccgaaagtggtgctcgacggcgagtcgcgggcgatctacttttcgcgctcggtgattccctacctgcggggtgtggagcggtcggagtggctggcgaaacatactttctataaacatatcggtatgtatgcctttcgtacgaaggtgctcgccgaggtgacggccttgccgccatcttcgctggagaaggccgagtcgctcgaacagttgcgctggctggagaacggctacaggatcggcgtgggtatctccgacgtggagaccatcggcatcgacacgcccgaagatctggcggccgccgaggaatttttgaaacgaatgaagcgatagaatcatggataaaaaacctctctttatagccggtccctgcgtgatcgaatcggcggaattgctcgatacggtcgctgtgacgctggcggacatcaatcgtcggctgggcgtcgaaatcattttcaaggcttcgttcgacaaggccaaccgcacgtcgatttcgtcgttccgggggccggggttggaaaagggccttcggatgctcgccgacgttcggtcgaagtgggggctgcggctgctgaccgacattcacgaatcctgtcaggccgctccggtcggcgaagtcgtcgatgtgatccagattccggcattcctttgccgccagaccgatctgttggtcgctgcggcccgtacgggacgtacggtcaatatcaagaaagcgcagttcctttcgggtgaagatatgcgatacccttatgaaaaggcgatgaaggccggtgccggtgaggtttggcttaccgaacgtggcaatatgtacggctacaacaacctggtggtcgatttccgcaacattcccgacatgctcggtatcgcttcgacggtcgtcatggactgcacgcattccgtacagcgccccggtgccgccggcggcaagacgggcggtaaccgcgagttcgtgcctgccatggcccgggcagcccgggcgttcggtgccaacggtttcttcttcgaggtgcatcctgatcccgatcatgccttgagtgacggcccgaacatgctttatctgaatgatttggaaaacgtaataaaatctttgctataatatgaccgcagacaagcgggccgatatcctctcgctggcccgaaagacgatccataccgaagcgctggcgctcaagcatctcgaacagacgctgggcgatgatttcgtgtgcgctgtcgaacttatcctgcacagccggggcaagctcgtggtgaccggaatgggaaaatcggggctgatcggccgcaagatcgccgcgacgctggcgagcaccggtacgccgagtttcttcctgcatccgggcgaggcttttcatggcgatctgggaatgatctctccggaagataccgtgctggcgctttcttattcgggcgaaacggatgaaattctcaagatcgtgccgttcatccataccaacggcaacaagctgatttcgatgacgggcaatcccgaatcgacgttggcccgcaattcggacgtgcacctcgacgtggccgtacgccacgaggcctgcatcctgcacctggcgcctaccacttcgactacggcacagatcgccatgggcgacgctatggccgtagcgctgatgaagctgcgcaatttcacgagcatcgacttcgcgcggctgcacccgggcggcagcctgggccgccgtctgctgatgactgtcggcaatgtgatgcacaaggagggtttgcccgtagtggctccggactgttcggccaaggatatgatccacgccgtcagcaaaggcggtctgggtctaatcgtcatttgcgagggggacaaagtgctggggatcgtcaccgacggggatatccgccgggcgatggaacgccgcgaatcggagtttttctcgatccgggccatggacatcgccacgctcaaccccaagaccatcgggcccgatgagaagctgatcgctgcggagaagaaaatgacccagcataagatcaattcgttgctggtgaccgacgacgaaggcaaacttgtcggtgtgatccagatttacgacataaaactttgaaaactatgtttctgattatcgtcgattacaagaagccgctcgaagaggtggagcgctacctggcggagcattgggcttttctcgaccgttatttcgctcagggcaaattgctttgcaccgggccgcagaatccccgtacgggcggtgtgatcgtttcgaaagccgcgaatcgtgcggaagccgaagcctttacgcgggaagatccgttcttccggcatgagatcgcagattatacgatcgtcgagttcgaaccgaccaagtatcttcccggattcgagaaatttcggtagtaagcaaataaacaggagcgcccgcgactaatcgcgggcgctcctgttttcggaaaacggctgtggaaagtgttgtaaaccgttttgatccgcctcttcgtaacgttttggaagaaaggcggtcgtttgactcttctcctgtatcggataggggttgtttcgtgtatttttttgcggctttccggttgaagttcctggtgtcgttgagtggttcggatgcttctggtccggggtgctctattatccccgtacgtagtgcggcatttcggcgggaatcggcatcgacagttcgatgataccgcctacggtgccgtcctcgcggcgccaggctgtttggtagatcattttgcggatcccttttttctcgatggtgtaggcattcgtgtcgcctttttcgaggatgcgggcgatgatccccttcgagcgctcgttgtggcaggggagcatgcttttgccgcgatactctccattgacggagatagattgcttgttctggtaaattaccacgccttcggtgtcgcataccgttacggcgcagttcgtgtcgtcagcccaattaaaattcatagtactattctgtttttatagtttcttcggttgtagaaagcgaggtcgggactgtattttattgcgaaatcttgaccagttgttcgcggtaggcggtcatgattcgcgatttggagatgtagcccaggtagtgtttctccttgtccacgacgggtaacacccagacgtggttttcgtcgaaacggcgcagcacgctctggatctgttcatgttgcaggatcgtgtcgggggacaggagcatgtagcgtgtaatcgggttgccgtacttttgcggattgaacaggtcttcccgcacgtcgttcaggcggacgatgcccagcaggtgtttttcgttgtcgagaaccgggaaatagtcgtcgtgacgctcccgggacatgatctgcacgatgtcgcccaaagtctgggacgggtggatgtaaaccccgtcgtcctgaatcaggtcgtcgagcctcagaaagacgaagaccgattcgtccttgttgtgggtgatcaactccccgttctggcgcagttgcttggtatagatcgagtcgggatcgaggtagtagtcgatggcgaaggcgatgcaggcggtaatcatcagcgggatgaaaaggccgtaaccgctcgataattcggcgatcaggaagatcgaggtcaggggggccttcatcacgcccgacattacgcccgacatacctaccagggtgaaagaaaccagcgacaggttccatccgaacagggtgttgcagaccagcgccgtgatagcgcccatgaatgcgccgacgaacagcgaaggggcgaacgtaccgccgacgccgcccgcagcgttggtcgaggccatagcgatcactttgaagaacatcgtgcctacgatgaagagaatgaccacccagtcgatctgactgaagcggtagaagagcgagttgttgaacaactcggtcgtgttgccgtgcatgagcgacatgaaaccttcgtagccttcgccgtagaggggcgggaaaatgtagatcaggatgccgagtacggctccgccgatcagccacttcttgtagggactgtcgatctttttgaagaaggcgcccacccgggcattgaccgtggtgaagtagtaggacatcagcccgcagaagatacccagcaggacgaaaagcggaatttggttgagccggaacgcatcgtcgggagtcagcgagatggcgatgatcggatcgaatccccggatcgtgagggcgatggcggcggccgtgatcgaagagatcagcagcggtacgaccgtgcgcgaggtgagatcgagcatcaggatttcgagcacgaagaccacgcccgtgatcggggctttgaagatggctgcaagggccgccccggcaccgcagcagagcagcagggtagtgtttttgtagttcaggtgggccaggcggctgatgttcgaaccgatggctgcgcccgtcaggacgatcggggcctcgggaccgaccgaaccgccgaacccgatcgtcgtcgcaccgcctacgaccgaagtccagcagttgtgggaggcgatgtacgagtttttacgcgacatggcatacaacacgcgtgtaacgccttccgaaatgttgtctttgacgacgtatttgacgaaaagcgaggccagaatgataccgatgaccggatagaacaggaagagaaaatgcgactgttcgacggggaaccaatgggtcagccctgctttgattccgtagagcagcagttcgaacaggcaggtacccaatccggccagaacccctacgatgatggctagcagcgccatgatctgcgtactggtgaaccgtttggtaagctccaggaaacggatgtagatacgttcgccccaatccgcgatcgtctgcggtgttatgcgtttgaacatttcgggtaccttgtctgctggttatgcgcgttatcgctgttgctggtattggcgagcctgctctgcgatcagctccttgtcgtcgaaatagtcgatccgcatggcgtggcgcacttcgccgagcgtttgcgcggctgttgcccgggcatgctccgaacctttgcgcagaatttcatagacctcttcgatgcggccttcgtactgcttgcggcgctcgcggatcggctccagcgtttcgttcagcacggcgatcaggaacttcttgaccttcacgtcgcccagcccgccccggcggtagtgcgccttcaactcgtcgagcgaggcgtaatcgggcaggtatcgctgaaaatgttccgggcggctgaaggcgtccaggtaggtgaagacggtgttgccctcgaccttgcccgggtcctccacccgcaggtggtcgggatcggtatacatacccatcaccttcttcttcacttcatcggccgagtcggagaggtagatgcagttgcccagcgatttcgacatcttggccttgccgtccgtaccgggcagacgcaggcaggccgcgttgtcgggcagcagaatttccggcatgacgagtgtttctccatatacggagttgaatttatggacgatttcgcgcgtctgttcgatcatcggttcctgatcctcgccgaccggtacagtcgtggccttgaaagcggtgatatccgaggcctggctgatcgggtaggtgaagaatcctaccggaataccctggcgctgcgatccatcttcttcgttgccttcggcgaagccgcgcaactggatttcggccttcaccgtcggattgcgctgcagacgggctacggtcaccaggttcatgtagtagaaagccagctcgcagagttccggcacctgcgactggatgaagagcgtcgattgcgcgggatccagtccgcaagagaggtagtcgagagcgacttcgatgatgttctgccgcactttctccgggttgtccgcattatcggtcagcgcctgtgcgtcggcgatcatgatgaatattttctcgaattcgcccgaattctgcaactccacgcggcggcgcagcgaacctacgtaatgtcccaggtggagtttgccggtcggacgatctccggtgagtatgatttttcccatcagttaaaaagtttctaataataaatagtctgcaaatgtacgaaaaactaaaccgatggtcgaataataattgcgaagtatcggttttttttatattttcgtgcgtgcaaataagataaactatgactatcatccaactcgaatacctgctggcggtagccaattgcggtagtttctctttggcagcggaacactgtttcgtgacccagccgtcgttgagcatgcagatcaagtctttggaggaagaattgggcgtggtgctgctcgatcgcagcaagaaaccggtcattccgaccgaggcgggcgaggtggtgcttgccgaaatccgggaaaccctccgggcttacgatcatatccgcgaagcggtcgcggaactcaaaggcgaaacttccggtcggttgcggctcggcgtcattccgaccatcgcaccttacctgttgcataagtttattcccgatttcgtgcgggactatcccaaagtcgaactggagattgcggagatggtgaccgccgacatcgtcgatgcgctgcgccgcgaccggatcgatgcggcattggtcgccggcggaacctgcggcgaggggattcaggaacacgagttattcgacgaccggttccatctttacgtgtcccgggagaatccgcttttcgaacgcacgaacgtccgtatcgaggatatcgacctcaaggagctggtgctgttaagtccggggcattgtatgcgtgaccagatcatcgagctgtgccaggccaaacgggaggtcccctcgcactatacgttcgaatccggttcgctcgatacgttgatgcggatcgtcgattacacgcactgtgtgacgattatccccgaaatggccgtggaatacattcctgcggagcatcgttgtcaggtcaaaacgctggccaagggggctacttcgcgcaagatcgccgtggccgtgcgccggacctatgtcaaaagttcgatcatcaaagccttgatcgatactattttgtcgaaagtttcccgccaatagggattcgggacggatatttgcagagtaaattttcggatattctcttgtatctttgcgggaagcgggatgcgttcggcataaaaaaacaaacgggtttgttttgttctgccctcattttcgctacctttgcaaagttgtattgaccggtaaattcaaactatggaaaaattgacaggcacgataattcgtgcaatccaggataaaaagggtaaaaatatcgtatcgttggatctttcgaaaatcgacggggcgatctgctcctgcttcatcgtttgcaacgccgactccaccacgcaggtcgctgcgatcgcggcgggtatcgaggagcaggtattggaaaccctcggcgagaaggtctggcgcgtggaaggacagcaaaatgcgctgtggatcgctatggactacgtggatgtggtggtgcatatttttcagacagaattgcgtgaattttacaaattggaggagctgtgggccgatgccccggcgacccgttatgagtatgacgaataatattttatggcacaacagaaaataaacaacaaaatgaatatgccgcgtccttcgtggatgtggatatacggcgtcatcattatttttattgtcggctactggatgttcggacccggcaacggagtcccggtcaagagcgactggaataccgtggcgcagatgatcgagcagggcgacgtcgaaaaaatccaggtcgtcaatcgtgacctggcggaaatctaccttaagaaggatgctgcggaccggtaccgtaaggatgctgttgacccgcgtttccgtaatatgcccgaaacgggggctcagcttactttcaatatcgggtcggtggatacgttccgtcaggatttggataaggtgacggccgagtcgggtaacaaggtggtgctggtgtacgagaaccgggagaattcctggacatcgattctgcttcagatgcttccctggatcattattatcggcggctggttcttcctgatgagccgcatgtcgcggggggccggaggcggtgctggcggtattatgaacgtggggaaggcccgggcgcaggtgttcgacaaggagaactcgaaaaaggtgactttcaaggacgttgccggactggaggaggcaaaggtcgagatcatggagatcgtcgatttcctcaagaaacccgacaaatacaaatccatcggtgcgaaaattcccaagggcgcgttgctggtaggccctccgggaacgggtaaaaccctgttggcgaaggcggtggcgggagaggccaatgtgccgttcctgtcgatttccggctcggatttcgtggagatgttcgtgggcgtgggcgcttcgcgcgtgcgtgaccttttcgagcaggccaagcagaaagctccctgtattcttttcatcgacgaaatcgacgccatcggccgggcccgtggcaagaacgccgggttctcgggcaatgacgagcgggagaatacgctcaaccagttgctgaccgagatggacggtttccagaccaatacgggcgtgatcgtcctggcggcgaccaaccgggtcgatattctggacaaggcgctgatgcgtgccggacgtttcgaccggcagatcgaggtgggattgcccgacgtgaaggagcgcgaggagattttcgacgtgcacctgcgtccgttgaagctcgatccggagctggaccgtactttcctggccaagcagacgcccggcttttcgggtgccgacatcgccaatgtctgcaacgaggcggcgttgatcgcggcccgtcacaataagaaatatgtgtcgcgcgaggatttcctggcggcgatcgaccgcattatcggcggtctggagcgtaagaacaagatcatttccgacgaagagaagcgggtgattgcctatcacgaggccggacacgctacggtaagctggattttggagaatgccagtccgctgatcaaggtgactatcattccgcgcggcaagtcgttgggcgcggcctggtacctgcccgaagaacggcagatcaccacgcgcgagcagatgatggacgagctggctgcgatgctcggcggccgggtgtccgagcagatcaatttcggcgaggtttcgaccggagcgctcaacgatctggagcgggcgaccaagatggcgtatgccatggtggcttattacggtatgagcgagaaggtcgggacaatcagctattacgactctacgggccagagcgacatggcgctgaccaagccctattccgaactgacggcccagcagatcgatgccgaggctaaaaataccattgccgaagcctatgcgatggcggcggaggtgctccgcagccatgccgacggtttgaaggagttggccgaactgctgttggagcgcgaagtggtttttacggaggatgtggagcgtatcttcggtaaacggaaaaaggatattctgcgggaacggaaagaggccgagcagaaggctttggcggagcggaaagctgcatccggcgatgcggaagaggcagccgggaaaaaagaggttgcgtcggccgagccccgaaaggacgaagaaaagatttccggaaccgccgcttccgctgtgtcggacggaaaatcgtcggcggaaacgcctgaagtttaacgaggtttacccgaaaaaggttgaattatgtctgataaaataaggaatcttctggtgcgaaccttgagcggtgccgtcctgactgtcgtggtagtcggagcggtgctttggtcgcagtggagtttcggagtgctgttgctggcgattctcatcggcggtatgtgggagttttaccggatggcccgccgggaggatatttaccctctcaaatggctcggactggttacgggtacggctcttttcgtggcgagtttcctgctggcggtttctgcggagcaggtggcgttgttgccgagagcgctttccgtcctcttgtggttgttgccggtttttattttgctcataccactgatgttcgtctgcgaactgttcctcaagcgtgcccgccccgccgccgatgtgggggcgacgctcggaggtgtcttttatgtggccgtgcctttgtcgatgatggcctatctgcctctgctgacggggaagggtggctggaatccctgggtgattttggcctacatcttcattatttgggccaacgacgtattcgcctacctggtgggggtcagcgtcggccgacatcatctttacgagcggatttcgcccaacaagtcgtgggaggggttcttcggcggcatcgtcggtgcgatcgccatgggttgccttgccgcatggtggctcgacggtagctattggctgtggtgctgtttagctgcgatcgctgccgtgagcggtgtgttgggagatttgatcgagtcgatgttcaagcgtgcggccggcgtgaaggattcgggcaatattctgccggggcacggcggttggctcgaccgtttcgatgcgctcattttctcgttgccgttcgtggtcgcttatctggtattgctgtatatttcataagaaaacttactatccgaatatgaaaataaacaaggaaggctacaagattatcgggctgacaggagtcgtttgtttcctgctttgggcgctgatgtactatctgatgtcgcgccatgccgaagcgggactgctctggttcggatccattctgcttgtgctgttttggttctttatcgtggcatttttccgggagccgcggcgtgtgaagatccatgatgcggagttggtcttcgctccgtgcgacggccgggtcgtagtgaccgaaatggtgcacgagagcgaatacctcgatcgggagatgctgcagatttcgatcttcatgtcgattaccaacgttcacatgaattgggtgccggtcggaggtaccgtggagtatttcaagtatcatccggggcgtttcctggtggcgtggcatcccaagtcctcgaccgagaacgagcggacgacgaccgtcgtgcgaacccccgacggcaaggaggtgctcttccgtcagattgcgggtctgatcgcccgtcgtatcgtttcctatatgaaagtcggctcgaaggtggagcaaaattcggtttgcgggttcatcaagttcggctcccgcatcgacatccttctgccgaaggataccgaactgctcgtggagatcggggatcctgtcgtgggatcgcaaactcccatcgcccggttgaagtaacttattggcggcggttttcgcgttgcggtacgtatgagtattacacctcaaacattgcttcgttttacggtgggggcggccattacggccgtcgtcctctttttgatgtggtacttcagctccatcgtgatctacattctggtttcggcggtgctggccattatgggacgcccgctggtagcccggatatcccgaggtcggatcgggcgatggcgtgtgccgcgctggtgcggagcgctcgttacgctgctggtgatctggatcgttttcgcggtgatgtgcgggcttttcgtgccgctggtgaccaacaagctctaccagttggcgcacctcgatttttcgacggtgctgacttctgtcgaggagccgctgcagcgtattcaggattatctcactcacttcttctcgttgcccgaaacccaggtgtcgttcaaggacacgctgatcttgttcctgcagtcgctgattaatttcgacacgatcaatacggcgttttcatcggtggtgagtttggccgtttcgagcgtgatcgcctttttttcgatttcgttcatcacgttctttttcctgcgggacgacggacttttctatgcgatggtaacggcacttttcccggatcgataccaacagaacgtgacgcatgccctcaattcggttacagtgcttctgttccgctactttcgggggattttggccgagagcttcctgttgatgttggccgtatcgctggtgatgatggctttcggcatgagggcgcaggatgcctttttcatcggtcttatcatgggggttatgaacgtcgtgccatacgccggtccgaccatcggcggtgctgtttcggtctgcatgggtatcatcaccccgatcgaagggatgtcgatcggccatacgatgctggtcattgcaggatcgctgttgattttgaaggggctggatgatttcgtgctgcaaccgacgctctactccgagcgggtcaaggcgcagccgctcgagatatttctcgtgatcctgattgcagggtcgttggccggggtgataggcatgctgctggccataccgctttataccgtgctgcgggttttcgccaaggagtttttctcccagatttccctggtgcgcaagctgaccgaaaagatttgaggctatgtctgtctggatcgaaggagaggtgatgcacggacggcaactgggccgtgagttgggatttccgaccgccaatatggaggttgcggatgcggatacgatcgaaagcggagtgtatgagtcctatgtggagatcgacggtgtggagtataaggccatgtcgaatctggggagcaacccctcggtgggcggaggtccccgacatctcgaaacccatattttcgacttttcgggcgatctctacggtcggagactccgggtcgagctgcggcgtaagatccgcgacgagcgcaagttcgattcgctggaggagttgcagcgccagatcgaacgggatcgcagctgtattttgagttcggagaatcggcggcgatgaccgtgcggcggtttatgccgtttttcggccggaggccgtgtttaccgctttgtggcttcgattcccttcggcgggagtcggtgtcgcaatgcggccgacgagagccgacgattcggcaagagattatgtataattgattaaatgataaaaagtatgtttttggatttgtccctgccttacaaagtggccgatatgtcattggccgaatggggccggaaagagattgagatttcggagcacgagatgcccggactgatggccatacgccgcaagtacggcccgcagaaaccgttgaagggcgtgcgtatcatggggtcgctgcatatgacgattcagaccgccgtgttgatcgaaacgctggtcgagctgggcgccgacgtgcgctggtgctcgtgcaatattttttcgacgcaggaccatgcggcggcggccatcgccgaagcgggggttcccgtctttgcgtggaagggcgaaacgctgcccgagtactggtggtgtacggcgatggccatgtcgttccccggcgggaagggccctcagttgatcgtcgatgacggcggcgatgccacgttgctgatccacaaaggatacaaggccgaaaacgacgcttcgacgctggattacgaaccgtcgtcttacgaggaggaggtcattctcgatacgctgaagaagattctggccgaagataacggcaaatggcaccgaacggtagccgagtggcggggtgtgagcgaagaaacgacgaccggcgtgcatcgcctttatcagatgcaggaggcgggcgaactgctcgttcctgcgatcaacgtgaacgactcctgcaccaagtcgaaattcgacaacctgtacggttgccgcgagtcgctggcggacggtatcaagcgggcgaccgacgtgatgattgccggcaaggtggtggtcgtttgcggttacggcgatgtcggcaagggctgcgcccgttcgatgcgttcgtacggagcccgggtcatcgttacggagatcgacccgatctgcgctttgcaggccgcgatggagggtttcgaggtgaagatcgtcgagagtgctctggccgagggtaatatttatgtgacctgcacgggaaactgcgacatcatcacgctcgagcacatgcagcggatgcgcgatcaggccatcgtctgcaacatcggccatttcgataacgaaatccagatggcccgtcttgaggcttcggatgccgtgcgtaccaacatcaaaccgcaggtggataagttcaccttcctcgacggccattcgatctttatcctggccgaaggtcgcctggtgaatctggggtgcgctacgggacatccttcgttcgtgatgagcaattcgttcactaaccagtgtctggcgcagatcgagttgtggcagaagaaactggaggtgggagtgtatcgtcttcctaaacatctggacgaggaggttgcccggctgcatctggataacctcggtgtggagcttacgcagcttacgaaaaaacaggccgactatatcggcgtaccggtcgagggtccttacaaggccgagcattatcggtattaaaaatagatcgggttccgttcggtgcccgaaaataaacccggcgtcagtttatctgacgccgggtttattgtttcgggctgcgggcgattggtcgagtaaggtgcatccgaaacaggacgtaccgcttgctttgcctccggggaaaggaggataaaaaacgtcttcggaaaaatccgaagacgttttgaatgatcgggtcggtggaattaatagccgaacatctccttttggctcacgatctgtaccgtgcccagcttgcgcaggtaatcctggtcgaggtctttcaggtcgccgaggatgcaataggtgtatttgcggtccttgatccactgttcctgggcggctttgaggtcggcgaaggtcatgtcctggaccttttcgaagatggctttgttgcggtcttccgttacgcccagatctttgttggcgatgtatttccagagcacttcgtccttgatcgtacgcgaggtccgcagattggtcagtacggcttctttggccagtttgaaggctgcttccgattcgggcatgttgttgatgatctcatcgaatgcgtcgatggcctgggccattttgtcgttttgcgtggcgatgatcgctgcgaaaagataattgtcgtccaggtagctcggattgatccactccgtgaaggccatgtaagccaggctgcgggattcgcgcatctcctggaagacgatggctcccatgctgccgctgttgtattcgttgtacagtttcagagcgggatcgaccgctacgtcgaattttttgcccaggttcgagtactggaggaagtagagctgcggcgcgttgtagttggccaggcagaccttgttctgttccgtaggctggaacgcgatatttccccgagtcagcggttcgagcacttccggcgtttggtggtgtgctttcaggtcggcgagcagcccggctttgtccttaggaccgtaatagaggatggtgtgctgctttttcagcaggtcgcggaccttgccgatcagtacgtccgacgtgagcgcttcgagctgctcgttgttgagggtcgtgcgctggatagcttctccgccgaagaaggcgaaacgctgcaaggctgcgaaattcgcttcctggttcagtttgttgtctgcacgttttttcagcaggtcggccttgtagttggcgagaatctcttcgtcgccctgtgcattggctaccaggtcttcgaagatatccatgacctgtcccatgttttcgctcaatcccttgaaggttatcgcacagcggttctgactggccgacaggtcgtagtagcaggcgatgtcgtagagttcggatgcgatctccgcagctgtcttggcctgggtgccgaggtagtcgatataagcgaaggcattgttgagcgccggatcgttcagcacgccggtatcgaagaggtaggtcagcgagaaaaggtcgttgatgtcatttttcttatagaggacttcgaggctggaatcggttttgaaaatctccatatcgcggttgaaatccacgaatacgggttcgatcggagttaccgtcgaattttgaatttcggtcaggaatgcactctgggtgtcgcggttcatctggatcggggtgagggccggtttggcgatcttctgcacgctggggtcctctccctggcgtttgtagataatgccgtaattctcggtgccgagtttttcattggcccaggccaccagttgttccttggtgatggagccgatgcggtcgagcttggtcacttcgtcgctccagggaatgtcgttgtagaaggacgaaaggtacatttcgacacgtcccacgttcgtctcttcctcgcgcatggtcgatactttcaggttgtttacgaccgccttgatcagctcttcgctgaattcgccgttgcggagtttcgctacctctgcgagcaacagatcccggacctcgtcgagggtctgacccgctttcggaagaccttgcagcacgagggctccgtagtcggcccgctgatccgggtacgagaaggcgtcgagtactttctgttgctgcatcaggtcgaggtcgatcatgccggcctgtccgttgtagaggatccggctggccaacagcaggtattccgcatcgtccgatgcggcgttgtccgtgcgccatgccagcgttacgttcgcggcgtcgggaccgtaaacctccttgacgatgggtttggtgatcggggcttcgggttcgaaggcgagctgcgggatattctcgttcggctgcatatcgccgaaatatttgtcgatcgtggcgatcatctggtcgggatcgaagtcgcccgaaagcaggatggccatgttattgggcacgtaatattgcgtgtgatagttctttacgttggtaatcgacgggtttttcaggtgttcctgcgtgccgagtacggattgtttgccgtaggggtggttcggatagagcacttcgccgatcgtggtgtaaaccttgcggttgtcgtccgtcagggacatgtttttctcctcgtagatcgtttcgagctcggtgtggaatccgcggatcacgacgttcttgaagcggtcggcctggattctggcccagttctcgatctggttcgaaggaatgttttcgatatagaccgtccggtccatcgaggtgttggcgttggtttccagagcgccgatcgccgacatcagtttgtcgtactcgttggggatggcgtatttcgaagcttcgtagctgatgctgtcgatctgacggtagattgccgcacgctccgcatcgtcggtcgtcttgcggtaaacctcgaagagctgttcgatctggtcgagcaggggcttctcggcttcgtagttgctcgtgccgaactgttgggtgcccttgaacatcaggtgctcgaaatagtgggccagaccggtcgtttcgctcgggtcgttcttgccgccgactttcacggcgatgtaggtttcgatgcgcggttctgccttattgacgctcatatagactttcagtccgttatccagcgtgtagatacgggtcttgagcgggtcgttcttgaccgtttcgtacgtgtacccggatgaatcggtacaggccgtggtaagcagcgcgaaggccgttgccgcgattaataacagaaattttttcatacggtttatattttagaatgttgttacgatccagttttttacgacagggtaggtgtccgaccagacgaggcagatcatccagatggcggctacgagcttcaatcccgtacctgcgatgaaggcgaggaaagagccgaagcccgaacggaacgccttggccgagtcgctgcggtcgtggattagctcgccgatgaccgcgccgaagaaagggccgaggatgacgccgaccaatccgcccgcgaaaaatccggcgatcatgccgacggtcgccccgatcgaccctgcccgcgtaccgcccaccagacgtgcgaaatagccgggcaggaagtagtcgatgaccgaaacggccactgtcacggccagccagatccaaagtgtcgcggacgatatttcggaatagctgcaaaaggaggcgcagagtaatcccacgtagctcaacgctacgcccgggatgatcggaacgatacatccgacgatgcctgtgatcgaaaacaggaatgctgcgatcgaaagcgctatgtccataaaaatgcggccggcaaaataggttgcgtcgtttttttcggttctccgtcaggctgtgccgaacttgtttggcgtatgtcctcgcttttcgggaacttttatgcaaatatatgggttatcgactgcgtcaccaaatatttaggggcatttttgacggttcgtaccgcgtatgaaaaaatcctgccgttgcggggcaggattttcgatcgtttgccggagttttctaccggatcagcttgttggttttcgtatccgggaatatcacccagggcttgaaggctttggcttcttcgaaatccagcagggcgtaggaggcgatgattacgacgtcgcccacctgcaccttgcgtgcggcagggccgttcagacagatcgcaccgctgccccgctctcctttgataatataggtttcgaggcgttcgccgttatcgacgtccagtacctgtactttttcgccttcgatcatgttggccgcatccatcaactcttcgtcgatggtgatgctgcccacgtagttcaggtcggcctgcgtgaccgaaacgcggtgtattttggatttgagaacttcgatctggaatttcatcgcaatttgatgttatcgattaaacgaatatctccggcttgtacggcgatgcagccttgtattgccgggctctcttcccaggtgcggacctgctgcatggtcgccgcatctacgacctgaaagtagattactttcagcagcggattgctctctacctgtgccgtaacccaggctgcgagctggtcgggtgtcgtctgatgggatttttcgactgcagccttcaataccttatatatataaggggccgccgtccggtgatccgtatcgagcagggtgttgcgcgacgaaagcgccagcccgtcctctccgcgcacgatcgggcaggggatgatctcgaccggaatgcgcagttggcgtaccatttcgcggattaccgcgatctgctgaaagtccttctcgccgaaataggctttggcaggtttcaccagatcgaaaagccgactcacgacctgtgccacgccgttgaagtggccgggtcgggtcgcaccctccatcactttgtcgatcatgccgaagtcgaacgtacgggtgtcgggttcgggatatacctcctcgaccgaaggcatgaaaacatagtccgcaccgacctcttcgagcaggcgcaggtcggcttccggggtccgggggtaatttttcaggtcggttttgtcgttgaattgtgtcggattgacgaatacgctcaccacgacggtcgcacactcccggcgtgcgcgttcaaccagcgaacggtgtcctgcgtggagcgcacccatggtcgggacgaatccgatgccggaccggtcccggctgccgagtgcccggcgcagttcctcgctgtttgtgattgtttccattttcttggtttgaaaagttagtcgtattgacggcggcaaaggtagaaataacaattaagaatcggaagagaaaaattcaaaaaatgggaagagcgctccatctctccgaatccatgcggtcgaaaggcgattccgggtttggcaggtttcttgcggataccaggtagaaacttaaattcgtattattatggcagataaaatttatgatgtcggtcgattccgacactccatcgacaattggcagctctccatgttgctcggtattattttcttcatcgtgggtatcgtcgtctttttcgagccgggcggtacttatctcgcgctttccgtattgttcgggatcgtcgtgattctttcgggcgctttcgaactgtatctgggtacgaaggctcccaccgggtcgggcaagggatggtacatcgcaggcggtgtagtcgaaatcctgctgggtatcctgctgctgtgcaccccgtcgatgctcttcacgatcctgccgttcgtgctcggcttttggctcctcttccggggattcatggcggtcggcgtcgccagcgagatgatgggtgtgggtatcaagggcgccggctggacgatgacgctgggtattctcgtgattatttccgcgtttctcgttctgttcaatccgattatcggtgtcggtgtagtcgtgttctgggtgggattgtccctgctgctggccggtgtcgatttgattgcacacgctgtcactctgcggcggttgcgcaaggagctgtaacggtcgataatgttccgattcgtcttcggcctggcaatattttgccgggccgaagcgttttttatacagattcccgatgaattcccggcagcacgatcagaatgtctttgatctgtcttttgttctttatgtcaaaaaaattgttagaatatattcgtcggtttcatttttttgtttatctttacaatagttttaaggagaaggcttgaaatagaggtgtcgcggagtgccgttttctgccgggagagaggaagcgtcaatgaatttataaagtattgacgaatgaaataaacggagaagggcttgcgcggttgaatatgcgggccgtcgaatacggcccgataaaacggagcctactatctgcttccaaaacggatacggtccttgagcggatgtcggaagcggcttttcgagatattattataaaaaagtgattatatacttgatgtacttctttgggggcgtagcgccccgagtcccctccgaggagggatccgtggtggcagaattacagacgcagccacgagttgcgaataggtgaccgtcggataatggtacattactatatgattgctgttaaaaatagaaccacttttattcatccgaatgaggggcggttttgatcgttcggccccgagttcataaattaattaatttagggatagtcatttaattccttcaatttgagttaaccagcagactttcccttatttttccgatcatactcatcgttttgataggtctgttgaactctaacctaatctcttgccatagagatatttattgtgtagcctatatgggcgcatcgaagtcgtaccagagatttcgcacgtagtccactttgaagctcggcgtgcgctcttcccgtaggggtgaaagatacatgccgtaaccgctgcgttcgtatttgggctgaatgccccgacgggcgagaaaatcacggatggaaatccggttgctgtgtggtatggcagtcatttttccgtaagtttgttgagaaaacgatgtaaaattcagtgaaagaaaaggttggagtcttacaactctcttacacggcatccggcactgtaagtccgtaagaacccgtaagactttgtaagaggatttgtaagaaatgtaagattatgaaaataagaaagctaccttcttttttcaacattcttacatcgctgcatcgttcagcaatccgccgaggtgttcccgcaagacggtatagacccgtgccgtcttactatcctgtcgctgcgtttcgccgttgtaggttatcgtatagcgttggtaataggtcggaggtgcgggacgcagctgccaattttcggcaagaatccgccgcacggtgggatggtcaacgcggatgccgcgtatctccagcatattgaccatatcgctcacgtcgaaccggtactccgcaaggttttcggcctccataatgtcgcggatgatcgacagcatttcggtttcggtcttgctgcggttgtagtgtacgatccgccgcagggcatcggtgaccagcagtcggggcgcaaaccacatacggctctcttcatgtgacgagaacatacgttgttgcagataaaagagcagccccggtatctcggcccgcattttggccagcaggtgttggtcgtcatgcaggagcggcggcacgcgccgcacccagtagcgggtttccgccgcctcgatcaggacgggattgcgctcgttattggagcagagaacgaacttgccgaaaaactccacctcccggcggtcacggcctttcgcctcagccttgtagctgcgtgcggtcgataggtttttgatccgctcggaatcctcgcggcggttgagcagcacctcgtccacgcagatcaatagtttacccgtccagtcgtcgttgaactgcgagcggaaatcttcgttggtgttgaaggtaacgtttccgccgaagatcgactttaagagattgaggaaggtcgtctttcccgtgttgcgttcatccgacaccagcaacaataccggcagccgttgcaaggggcgccggtagagcagttgcagatagtcgtatcccagctcgacctgctcgccgaagatatgggtgagaaagtcgtggatgtgcggaaagatgccctcggcaggctggaaaggaatcggctcgtaacggttcaggaagccgtcgatctcccggcggtagttcgtgtggtcgggaaccgtgcagaagccgtcgtatttcggaatacgggccagatagcttttcccgtagtcctgccgcaaggtctcgacattccacgggataagcgtctcgacgctccggccgctgctcaacggctgccgaacccgcttgtagatagtcgttcccacgcgcaggtaggggctttctcttttcactgttttagcgggcatggcgacctccatttagaatccgttgcacatccgccacacgataacggcgctgcccgccgtactccacgggaacaagataaccgctcttggcccatcgccacaacgtagaggaatcgacacccaacaacgcgatggtctgttttcgcgtatacaattcgcccgcttgttgcggaaccggcattgcagacggcggcgacgcgactgccgtcaactcccgatgccattgccggagatcttccagacggacggtcacattcacttcaccgcccaactcactcaactgttttaagtccataatacgatgatttaaccgaacccgaaagcaggttcggcgacgaaaataacaggtgcttttcctgcacctgtttttgcaatcgaatcaccgcatttgcaccggcaaacaatttcagatattgctacttaccaacattttgcaattgcatgacaacagaaagaaaattccctgcaccgaccggatgcagggaatatctcatacttatacagctctttatttttggatatattctttcagattatcgagcaatcggatgcgataacctccgtccgtcgcccggagtttggcccgcaacgtcttcgtattgtatttggccaaagactcgaagctcgctttcagccattccgccaattcggtctggtcataaaaacgattggtcgcgcccttaaaagcattccagacgttccaaccgtagtgacacaaatccccatagctcacccgatcatgccgaagccgaacctgcggcacatcgttcggaacaggcgtcatacatgccagataaagcaagcgtcgtcgcaaaattcgcaggttcgtctcgtcaatggcatcgcccaaatccttgtcggtatattcgtaaacggtggcgagtgcattttcgagaatccgatcgtccggaatcgggtcggcagaaacaacggcggattccggcacgatcgcatccggacttctttcacaccgctggtcggaaccgactccctctgtcgttgttttctcttcgcctctcggctgactatgcccaaaccgacggaaaaaccgttccgaaagatcggccgaactgcccaggctgaaaaagtaaaatccgaccacgccaagtcctgcggggacaagcaagacaagcgccagccaaagcggaaatccctgtgagaccataccacagaataaaataatcaaggcaagaaccacgacacccgtcacgatcagacgaagacctttctggaaataataatcggaattcatagttacgattcgctgaaaaaatcatcctccattacaactttccgaaaccgatcccgcaactccgccatccgtgcgatcagtcgatcgtacggcagcgaatctccatagatgaaatactcctgcatccgctcataatccctgcgccatacctccgccaatttttcgggcggaataaaatcgatccggcttggatggtgcgtccgataatcgactccgcgaatcgtattgaatatgctgcgatgcttgacaatctcggcatacattctcggatcggccaaggctgcctttccgaaatccgtatccatcagccgctccaaatcgtacagatggcgtgtcattcgctcgaagcgcggattctctttctgaaactcttcatgcagcaaaaacgctttctccaaaaacgtccgtgtcggcacgaccgcataaatcgggaacaccaattctccgaatacatcgggatatgcctcggcaatcagcggacgaatctcgatccgctcacgcggttctttcatcgaccggcagctgaattcgatccggatttgcgattccacatactcgatattcgcataaatacttcgatacggcagcagcaccagcgtcggatcggcatcggagtcctgcgccggaacggcacgcaactcaaaatcggaagccccatatccttccagcaatgcctgcatttccgcaacgagccgctgctcgatataggcccgcgaaagtttccgaatccgatcgcgctgcgacttgttgtccccggcaattccccaaaaggacttgtcgattgcaatatcgatgtcctccgagaagcgttctatgacatgccaacccttgctcaacgacgtaccgcccttgaaggtgatgaagtcccggcacgacgattcgaacagggctttcagcgtcatcgtcacccaccagtccttctcgacagcctgcggaggaagcccgacacgctcgctcgtctgtgcaacgaacatacttttctgctcgtcggaaaacgtccaaaaattattcttcatagaacgacataatgattttacgaatccaagctggcaccaaccgcagatcgggcagaatgctcgacttcggaatccgagtgaatatcgtcttcagttgggcggtgtgctcctccgtcacctgcggccgaccgatctccttcaaagcgaacacggcaagcatcagcgttttattctgataggccagatttttaagcgccacacgcttgaatcgcaatttgcgaccgttgaacagattgaccgtccgggaattgccgtccgtataaaacacatagttcatcggtacctgggcagacaatcccaatacattcaatgcgtgcatacccgtcggaacaactcgggcttcgctctgccgggctactttttcagcgatttcattgatggtcggatattgtatgcccagtccgaactttctgtcgattttgggatagcaatagaggccccttgcaatacggactaaaccgccttttcgggtaagccgttccaatgccttcgcaaccgatacggccgatccgtacacagcgaaatcggatgcggaatacagcttaccccgcccgcactttttcatcttattaagtatcttgtcctctattgcttgcatttgcttatttgtttatttattgtcgctaatttatacaaatttatcgacaaaacaaattctactccaacacgctcacggcatcccgttttatatccatgtcgatatcgcggtaacgggcgaacgcccggctgccgtccttatgcccggacatcgctcccacgatcgcagggtctttcacgcttttataaacattcccgatgaatgtccggcgcgccatgtgcgacgaagcaaggtcgcagatcggcacctgaacattctgccgcgtccgctggtcaatcgtcgtcaccatgcgcgtcagtcccgccttacggaacgccgctttgatataaacattgtatttctgctccgaaataaacgggaacagcgttccacggttctcgtcgaggtatttgcgaatcagttctttcgcagcaccgatcagcggcaccgagaccgtcaccacccgatcgtcgcgcgtcttgcggggaacgtattcgatgcaatcgccgatgatattggcataggtcatcttataaaggtcgctcacccgacagccgatcatgcactgaaaaacaaaaatatctctttgcgtttccagctgcttgtcatcccccatatccgcttcggccaactgtttgcgttcgtcggtcgtaatatagataggcgtaccgtagacaatctccgtgatcttatactgcttgaacggatcattggaagtatgtccattatcattgagccatacatagaacgaccgcagacgaatcaacatgtccgaaacataattcatgccccgctctttcggacggccgggaattaccgtttctcccgcagcgttgaggtacgggccgcgcttcacaggcagattcttcctcaccttcggccgagcatacggcacctcgtcgtacaactccggatgtacgtcgaagatttccggttctttcatcagaaatgccccgaaatcatcaagtgtcgccggggatacggtgtgtacatccagcacgaaccgtcggttcgacagtttccgatacaactcatatcgcttcagcgtccgcaccaagacattgaaatgcttgacacgcgactcggacaatttgtgtgtagagagatattcatttgtcaacgagaaaaaatctattttcttatcctcgacagaagtcgccgtcttcggccgcaaagtgcgccggatcaacttttcgagccactcgcgtgtaacggtcgatttgtcatctgctgcctcgaccgatgtctcgatcacgtcaaccagctctttcaatttcgcccgcttcgccaacagcgcatcgcgttcctcccccggaatattcggaatattgatatcgtttttctttccccaacgtctccgatcgacccaaatgccggatggcactcgtacacgtgattcgcgggaaacgtagactcggaaattaacttgcgattctcccgcactattctccccttgcgccaaaacatatgtaacttttgccatacatcctcattttatgctctacaaagatatgatttagattcgaatacagcaatactttcgtgtccgcaccgtgtccgcatttttgcaaaacaactaaaaacagacaaaatacatttcatagcatataattttaatatactatatttcaatatattataaatatattcgaatttcagttgtttgtatatgttttcataaatcaatccctgtcctgggcaccagaaccccgtcagagtttcctctgacggggttttgctttttccatacaaggcgtcatccctgacgaacgcaatactccgacacaccccttcgcactgtccgacgacgctcctcttttccggatgacaaaattttcccattgggtccgtacgcatttcttctccgatcgcgttctataaatgcgacagaaaaacagtatctttgtttcatgctccaagaatttctgcaatacttagcgacggtccgccgcttttccccattgacggtgcagaattaccgccgtgacgtgacaaacttccttgagtggctcgatgttccggaagcggatttcgatccccggcgaatcaccgtggaagacgtccgcgaatggatcgtgcaccgtacggaaacaaaacatctgggagccgcctcgatgaaccgggagctctcctccctgcggagtttcttccgttacctccaccgtacggggcgaatcgacaaagaggtcatgtaccgcatccacgcactgaaaacctcccggcgaatcccggcattcgttccctcgacacgcatggaggggattctcgacgaactggaccgggagagcgaaagtccggaattcaaatttgtccgaaattcgctcatcgttctcctgttttacagttgcggactgcggcttgcggaactcgtaggtatcgaccgcgacgatttctcgggcgactataccgcactcaaagtccgcggcaagggcgataaagagcgtatcgtcccgatcctgccgcccgtccgggaaaaaattttgcactatttggacgaaattgaccggcagggaatttgcatttctaaagaaaaagcactatttttaaatcagcaaggaaaacgaatctcccgcagcaccgtctatcggaccgtacagagccaattgcgacagggcggcgttcagggcaaaaagagtccgcacgtactccggcacaccttcgccaccgaattgctcaacaacggcgccgacatgagggcgatacaagaattgctcggacatgcgtccctgcaggcgacgcaggtctatacgcacaacagcatcgccaagttgcagaagatctattccaaagctcacccgcgcgagaaaaacggagcggagcaaacaaaacaacagaattgatcggccggagcacagttccgcagataacgaaccttataaaacatagtattatgaacgtacaaattcaatccgtaaaattcgacgccgacaggaagttggtcgaattcgtagagcacaaaatggacaaactcgaccgttttgtcgaacgggctatcggagccgacgtcatattgaaactggataaagaccacgaactcggaaataaagtcgccacgatcaacctccatattccgggagacgacctggtggccgagagccggggcaaaagtttcgaggaggcggtcgatctctcgatcgaagcgctcaaacgccagatcgacaagtacaagggccggctcgaaaaatagaataatgttatggtaatgcatagcggcgaccttaaaaggtcgccgctatgcatttattcacctcattttatccgtaaaattccatcgtattatatcaatcgagaaaattcagcaatgcaaatgacgcgacaagcggccaaaacagaaaagccaacacaattccaacgagcaataaaaacaccgcttctccgaaactaaataccccacaaagggttaaaataacgagaacgataaaataaccgataaaattaaacaaaacggctcctactaccaaagaaacataaccgaaaaaagaagagagacatccagtggtttcccgggtcgattcgggtttcctctgatccgtcggaataacctttatcaccgtttcctgttggagaggccttatcaagtaaatcgaatgtccgcatcggggacatgtcggagcataacgcgacacctccaatccgcaagcaggacaatggatcaacaacgactcttcggaattatcttttacctccggaaataaagtcaaatcaaccgccgacgcacattcatcgtttgacaaggattcctttcgcatattatcctttttcttcttcaagtgcctccgccatacaagtaacacaactattcccgcaagtgttaacccaagtaaaatttccacaaaagcatccatcgtattaaacacttttagcaatttaattagaagcctgcttcaagcctaaaacacccactatttcactaaaatcactccttcttccgccactcctgcacttcattctcccgtccgaacggattacgagtcatcaaccgtcgtgtcttctttatgtcgagtttctcctgattctcggacaaatacgctccgatttgggaatgaacccgatgaaatacacgcgaccgatcgtttttataggccgcaaataataactcgacatagataatttcatgtttatcgacaaatgcctcgataaaattgcgggtcgtaaaaatttcacccgccatctccgcaatcacctctccggcatacttggtcattacttcataaaccgattgttcgtttttctgttccatagttttttcttatttcagggttaaaaattatagtcgtaaagcagctcgaaatcatccaggcaaaggattctggagcctgcatcacaggcaattatcaaatgagtcggtttccggtctgttcgtaaatactccagaggaatcgtaaattgctgccaatcgacatcctcagccacttgcaattcaccgtaagcaatcaaatcggaacaggatggatccaaggcctcttcaagatactgatcaacaacaggatgctccgggattttaacgtcatgatctggtgccggagaccatgttcccaatgcgatcctaattgtcgcctcctgctccttcgtatctgtactcatcacgttcctgcattgcaaccacccccgcaaagcagtcggtgtcgcttcgaaaagctgtccgtaaatattccaaagcattgaaagcaccccaataacaccactaccagcagcaggatctacatttatcccagtaaaaatatgccctccatataaatcttttactatactaccccactcttctttctggagtttcacggcatatttcccagaactcccggggcgaatcgtcggttggggcaatcccatctctgggtaacccctcacgattgaagttgcccaaaacgccccctcctccgagaaattccactcttcaaagtcgccgttcgggagtttcaatgcgggcagcgtagtcacgatatgaatccgactctcctcatctcgccagcaggccattatctcgtaggtcgtctctggttcggcttctacgtgtgcagaaaaaccgttgctcgaacccgctccggcaacttccacccactctttatcaccttgtttccgataacggaagcccgcctgcgcaacatcggatgcacacgagccggacaaccaaatcacctgggtccagacatcggcacgttcgagtctgacgttgacagagcccgaagtagcctgtgtaaaacagatactgtccagtaaattcccctcggaatccaccagtctaaccgtagcctggcggcttttcacatcggaattggggcggaaagagaatacgagcgactcttctcgctgatcggtacgggaggtctccacactgatccacgtccgatctttctcagcaatctcaaccgtgtaatcgatgttcgtaataagcattactcgcaaagaggtgccttcagcctcgataaggtaggagttggcggaaagatcaaaaacaacatccgatttcgccttgacctctaaatcgatataacggcttactgtctcgttcccttcatcggagaggatcacgacaatccgctcgtccgtcgcagcatcgggcagatagataacgattttccccgaccagtaattcgtttcgatgacctgaacccgatagccgtccggagcgacaaccctcactcgtgcattttcactcgccccttccaacgtatatccaacctcacaggtttcaccggcaacaacctgcagcggcattgaacagtcgaatacaatattcaaattccccgaccctccatccggtccatcaccactacaccccgccaaccatagacaggcggccaataaagcaagcatttttttcataattataaaagtctgttgccacccggctccgacatggcgggttataattaggggataaaaaagaaagtgtggagccgttcgtttatctgataagaggttctgacaaaacccaagacgaataaaccaacacaataccccacacctgttcagtatggagcgattggaataatatacacataccgaaacagatgatgagtgttgtcgttatcctcgtcttgcttgaaactgtcagatttcttatcaaggataaaagcgaaacactttcatcaaaatatgtctgtcggacgaaaccgacaccacaaaactataaaatattttgttccggacaacactcgagggggtattgtcctgcaaatttccaaaaacagcccgttataaatacgattgcggaaaaaagagtatttttgtgcactgaaaccgacgtttccaatgcgctatacgaacaagaaaatcctgaaaatcaccttcccggtgctggtctgcctgctgatggagcagttgatcggactgacagatacggcctatctgggacgcgtcggagaggcggaattgggggcttcggccctggcgggtatcttctacctgatgatcttcatgctgggattcgggttcagcatcggcgcccagattctcatcgcccgccgcaacggagccaaggagtattcgcagatcggccctctgttcatgcaaagtacggcgttcctgctgttgatggccctcgtgctgttcatcctctcgaaagtcttcgcagcccgcatcatgggagccctgatcgaagctcccgatgtacgggaagccgccgtccggtacctcgactaccgggtttacggtttcttcttcgcctacgtcgggtcgatgttccgggcattctatgtcggcacgacccgcacgcgcatcctgacgatcaactcgatcgtcatggtactcaccaatgtcgtattgaactacctgctgatcttcggaaaattcggattccccgaaatgggcatcgccggcgctgcgatcgcctcttctatttcggaaggcgtatccgccctcttctacatactctacacccgctatcggaccgactggcgccgctataaattccgattcacaggattcgacttttccctgctgaaacaaatcctgagcctttcggtctgggtgatgatccaacagggcgtggctttcctcgcgtggttcctcttcttcctctgcatcgaacacctgggcaagcgcgacttggccgccacgaacatcgtgcgggccgtatcgtcgctgatcttcatgttcatcaacgccttcgcctcgacagccagctccctggtaagcaacctgctcggcgcaggctatgccgaacagatcatgcccctctgccggaagatgatccgcctctgtttctgcttcgtcctcccgctttgcatcctggcagccgcgattccttactggacgctccgcatctatacggacgacgtatctctgatcgaatacgccatcccttcgctctgggtaatgctgactaccaacattccctgcacggccgccttcatctatcaattcagcgtatcgggtacgggcaacacccgcacggccctcacgatcgtcgcctgcaccagcatcgtctatgtcgcttatacggcgctgctggtttacggactgcatgccgatgtcgcactttgctggaccgccgaccatgtctattacggctgcaccctcacggcttcctatctttatatgcgttacggcaactggcgtgcccgcaagatctgacatcggacaacaccgcttcataaaaaatacctctcccgccggggaagaggcataaaaaaagagtatcctttggggatactcccgtaagttccgaaaagggaaattacttggcagcttcagcaggagccggagtctctgccggagtctcgcaggccgttgcgcagctatcggctttctcgcaagcggcaggctcctcgcagcaagcaggagtctctacgacctcggtagcctcaacttcaacggtttcagcctgttttgcctgtttgccggcgcagcttaccatggcagcggcagcaacgacaatcatcagagataaaactttcttcatagttttaattattaaaggtttttaacgcggcaaatatatagattcgggtagaatctatcaaatttttttcgttatttttaatcttttggaaaattaacgaatcaggtcggccaccgtaagatcttcacgcatcagataagcctccggaaactggctgcgaatcttgcccagcaacacgatcgcctcctcggaagtgacgcaatttccggcagaaaccttgaaatagggattttcataaaccagatagaccggaatatccgggaatgcggtttcgaacgtctgcttggcggcaagcgcattggcccgggcctccgctccgttatcgaagaaaataccgattcggtaccctttgaaccggatgcggtcgttgctctggctctcccggctcacgacgcccgcagcatccccatgctccactacggtaacggctgccgaacccgcaggctgcgacagacgctccttgaaagaggcgagcgactgggccgaaacgccaccatacaatccgaaaacaaacagcaatgaaacgattatcctatacatagtcactattttcttaaaccagtcggaacttcccggatacactattcgaacggaaactcctcccggacaaagatagtgaaaggtgagagcaatcgtgcgggcttgcacgcaaagattgctgaaccgaatcctatcttctgcaaagatagtgaaagccgagaagaaaacggcaggaacctgctcccagtttcccgaagcgtatctcctatcttcggtaaaaataaggaaaggcacacggcaagccgaacctaacgttctgttttcctcctccttgcatggcagagtttgcaagtgttcttgacgcatgcttcgagcgtcggtcgcttgagcttatccgaggcgcatcctatcttctgcaaagatattcaaaaattcggaaaaaggcatcctttcgaaagaaacacggcgccgcacggcccccgcccgcagcgtcatccgcacttcgacctccagccgggcgtaatccccctcctccaatcgcttccgaaggaccattccggcggcggcatcgggaaaatcgaatttccagcgactgcacaccgggccgcaactccgtccgggaatttcgacagaacccctcaacacggcacgtcccagcgaacccgctccggtgaaaaattccaattcggcctcctcgagccgcaacgtgcggcgggacgcattttccacttcgaacgtcaaatccagacccaccgtaccgtactgacgcaccgccacctcttctccgatccggacctttcggaccagggacgcgccgcatccgctcaagagagcggcgaacaacaccggcaatacgtatttcaacaaggttctcacgcgaaggtcctatttttctcccgtatatatctgcgcgattcccaaactctgggaacgggccctgcaatccttgaatcccgcctcgcgcatcatcgccataaaacattccggagccggaaattcatccaccgaagcaggcaggtactcgtatgccttgcggtctttggagatcatcccgccgatagcgggcaacaggcgatggctgtaaagaccgtacacccttcggaacaacggattgcgaggggtcgaaaactccaggataacgaccttcccgccgggcttcagcacccggacgatctcccggagtcccgctccgagatccccgaaattacgcactccgaaagccaccgtcaccacgtccaccgacgcatccgccacctccaggcgctccgcatccccgagcgaaagcaccacccgttcgtccagtccgcaggccgtcgccttccggcgggcctccgcaagcatattttccgaaagatcgacgcccaatacctgcacgccccgcatgcggcgggccatcgccaatgccaggtcgcccgtaccggtcgctacgtcgagaatccgccggggctgcatccgccgcacgatccgcaccacatgccgacgccacaatttatcgatctgaaacgaaagcgtgtggttcaaccggtcgtacgccggagcgatgcggtcgaacatctcgcgcacctgttctttcttgtcctgctctgtatcgtatggtttcatcttttatgtactctatttatgaatcgtaacggatcgcctccaccggtttgacctgtgaaatgatcgaagccggaagcatcagcaacgttaaaatcacggccacgactcccgcattgagcgccaaccaccaccccacgccgaacgcgacgggcacctccgacagcatataaccctcgggatcgagcgggatcaggtggaaataatattgcaacagacagattcccaaaccgatcgcattgccccacacgacccctcgcaagatgagcatcaaggcccggtagagaaaaatccggcgcagcgacgcactgttcattcccatcgtcttcaacagaccgatcatacgtgtacgctccagcacgagcgtcagcaacgcggtcgccatgttgaacacggccacgacgaccatgatgaccaggatcaccgcagcattgacatcgtgcgtcttgagccagtcgaacacggtcgggaaccgctcctgcgcactgcgggccgtcaggtcccaaaaagcctcccgatccgaatccagcaacatatcgttcagccggcgggagaaatcttccgcctgcgagaaatccgcgagcgtcacttcgtagcccgacacctcgtcggacgaccagtcggccaaccgctgcacgtttctcaaatcggtcatcgccacgctccggtcgaattcgtccatcccggtcgcatagatacccgacaccttgaaccgatcgcggcgcggactcttctccgactcgacgaaaagcatctcgaccttatcgccgggcacaagccccatctcccgggcaacgctccgggagatcaaaatctccttggtgcgaatcgaatccccgacacggggcaactcgccctcgagcagatggtcccgaaaaaacgaccaatcgtaaccgccgtccacccccttgagcatcacgccgagaatcgcatcgggcgtcttcaccacgccccccttcacggcatagggagcgagccgtacgacctcgcctgccgagcggatcgccctctcgagctgttcgctgcggggtaccggcaccgactcgatcgacccggcgcttcgcagatcagcgacctcgacctgggccgagaagccggtgacacgatccgtgatttcccgcttgaaacccatgataacggccaaagccagaatcatcaccgtcacgctcaacgctaccgcgaccacggcgatacgaaccatcacacccggacggttgccgggtccgttacgcgcgattctgcgcgctatgaacagttcgagattcaccctcttccgattttgcacgtatttttcatgcaaagtaacataaatttttcttacttttgttcgataaaccgaccattatgaaaaaacaagctttaattacaggggccacttcgggcatcggacacgctacggcgctacggctcgcagccctcggatacgacatcatcgccacagggcgccgcgccgaacggctggcagcgctcaaatctgccatcgaagcgcagggcggcagttgccgcacgctctgtttcgacgtacgcagcgaagccgaatgcagaaaacacctcgaaccgctcgatcgggtcgatctgctgctcaacaacgccgggctggccgccggactcgaacacatcgaccagggctccacggccgactgggacgccatgatcgacacgaacgtcaagggactgctctacgtcacccgcatcatcacacccaaaatgatcgccgcaggcgggggacacgtaatcaacatcggatcgatcgccggaaccgagccttacgaaaacggcgccgtatattgcgcgtcgaaacacgccgtacacgccatttcgcaagccatgcgtgccgacctgctgagccaccgcatcaaggtcacggagatccgtccgggcatggtcgaaaccgaattttcgctggtgcgtttccacggcgatcaagagcgagccgacaagacctataccggcgtcgaacctttgaccggcgcggatattgcggaaacgatcgcctggatcgtacaattaccggcccacatgaacgttaatgatatagtactgatgccggctcaacaggccggtgcatactacacctgccggaatacgaaataacaaccctgtccgtcttcgaaatccggggccgaatatgtccgggaaaaatcgaagcgcagacactgaaattgaaaaattatgctgctgattttcaacctgctccaaagcggttattacaccacggagcccgtagcgtcgcggtacgacgccgccacgatgggcatgttcgtgctgattatcgtgatcggcgtaatcggctacatcgtgcaggcccgcctgcaacacgtcttcaaaaaatactccgaagtgcctttccccggcggactcaccggtgcggaagtcgccgaaaagatgttgcgcgacaacaagatccacaatgtgaagatcacccacgtcagcggacaactgaccgaccacttcaatccgcagacgatgaccgtcaatttgagcgacgcggtctattcgagccgcagcgtcgcggcggcagccgtcgcctgccacgaatgcgggcacgccatccagcatgcacagggctacgctccgctggcgttgcgttcgcagctggtacccatcgtgcagttctcctcgcgtatggcaatgttcgtcatcatcatcggcctggtgatcctggcctccacgcagaatgaactgctctgctggatcggcgtgggcatgatcggcgtatcggctctcttctcgatcatcaccctgccggtggaatacaacgcttcgcagcgggccctcgcctggctccagagcagccacacgctcgaaggcgcacagctcggacaagccaaggaagccctctcgtgggctgcccgcacctacctggtagcggccttgagtgccgtagcgtcgctgctctattacgttttgatgattttaggacgccgtgattgatggccccggaaaaggactacacacaccggagctggatcgccgtcaccctgctcatcgccgttctcatcggattgagcctgataccgccgcaaacgctcggcggggtcagtctgcgcagggctaacatcctgtccgacctcatctctttcgaagaagacctcgaaaaagccgaaaaagcgatcgatctggacgatgcggatttccacatcgacctgacgcaggtcgcccgccagatcgccgacacggtgcctcaacacgccccgaccacctacgaatggaacctccgggaagaggcggacgatacgactgcccaaccccggcttccggattcggtccggctgtcgccgacgctgatcccgatcgaagatttcgacacgacgggacacagccgcctcacggccttctatgaaaaactgcagaaaggcgacgctcctgtccgtatcgcggtcatgggcgactcgttcgtcgaaggcgacatcctctcctcggacctgcgtgaaaagctgcagctccggttcggcggttccggggccggtttcgctccgatggcttcgccgctgaccggcttccggcgcacgatcaaaacccagtccaaaggttgggactcctacaacatcatgcaacggcgaaacacccccgccgctatcagcgactattattacatctcgggctggctctgccaaccttcggacggagcctccgttcgctgggaaggttcatcggaccgggcttgcctggacagttgccgcacggcccggatcctgttcgtcagccgtgacgacagccgtatcgaggtgaccgtcaatgatcgggacaaccgtacgttcgacatcgaaggttcgcccgccgtgcgacagatcgtcgtccatgacgacatccgttcgttgagtttcaaggtactgtcgggtgccgcaggagcgatcggctacggtgcgatcttcgaatcggcgcccggcgtggtggtggacaactattcgatccgcagcaacaacggacaggcgatgttctggacctcgcccacggtcaatgcccagatcaatgaaatgctcggctacgacctggtgatcctgcaatacggcctcaacatcctggaaccgggcatccgctccttcgccaaatacggcgaacagatcgagaagatgatcgcctacatccggcagtgcttccctacggccgccgtattagtgatgagcgtcagcgaccgcagcgtgaagtcggactcgggattcgtcccaatggattcggcaccctacatggctgcggcccaacgacaggccgcgcaaaacagcggggcagccttctggagcgcctacgacgccatgcaatcgctcggcggcatggcgcaattcgtggccaacggctgggccggaaaggactacacccacatcaatttcgcgggcggtcgtcgcgtagcctgggctctgtacgacgccatcaaccgaggtgccgaacaacatcctcccttcacgcccgttgcgcatgacaacgtcatcgacacccggaaaatctcgcacctggaaatgatgctgcgccaggcagccaggccccgtatgcaaaaaccctaacgcccggacatgatccagacggtggaaaatatcggggaaaagctggtttcgatgctcacgtacgacgcatcgcagccgttgatcttcagcagcgggctgttccttttcctcttcgccggattcctcttcttctacggattcacccgccgggctccgatggcccgcatcgtctatgtcatcctcttttcgctctacttctattacaagtcgagcggcatctacttcctgctgctcgtcttcgcttcggtgagcgactactggatcgcccatgccatctacaaagtacggacgcaacgggcgaaatactggctcgtgggattgagcgtgttggtcaatctgggcatgttgggctatttcaagtacacgaatttcctgatcgaaatcgccaacaacctcttcggacaagggttcctcaacttccagaacatcttcctgccggtcggtatttcgttcttcgtattccagtcgatgagctatacgatcgacatctgccggggacaactcaaacccctaaacaactgggccgattacctgttctatctctcgttcttcccacaactggtagccggcccgatcgtccgggccaaagacttcattccccagatccgacaaaatccgctgcgggtcacgcgcgaaatgttcggcatgggcgtattcctgatcctcatcggcttattcaaaaaagccgtcatttcggactatatctcactcaacttcgtcgatcgtatcttcgacgagccgctgctctactccgggttcgaatgcctgatgggaatttacggctacgccctgcaaatctattgcgacttctcgggttactcggatatggccatcggcatcgccctgctgctgggcttccgctttccgaagaacttcgacgccccctacaaatcggccacgatcaccgaattctggcgccggtggcacatctcgctctccacgtggctgcgcgattatctctatatctcgctgggcggcaaccgcaaggggcgtatccgcacctatttcaacctgctcgtcaccatgctgctcggcggtctgtggcacggggcggccgtgcgcttcatcctttggggagcgctgcacggcatagcgctggccctgcacaagctctggctgagcgtcgttcccggctccaaagccacaggagccgaaatgcggtggttctggcgtattccgggcattttcttcaccttcaatctggtctgcttcggatggctgatgttccgtgccgaatcgatgaaaaccgtgcagctgatgctccaccaaattttcacgaacttcaatccttcggtcatcccccaggtgctcgaaggttatgccggcatcttcctgctcgtcggcatcggctacctgctgcacatgcttcccgaccgctgcgaccgctgggcgcaacgattcgtcacctccctgccgacggtcgtacaggttctcctggccgcgtgcgtcatctggctggtgatgcaggtcaagtcgagcgatatccagcctttcatctacttccaattctaaacgacctatgcactcctgcgacgaatccctgtttctggctctcaatttcgacggcggtccctgcctggaccggatcatgaccctcatctcgggcatggcgatctggattcccttttacctgctgatactctggctggtctgccggcgctacggatggcgcaacacgctgcttttcctcgcggcgctggctctcgccctggtgctctcggacatgctctgcggcatcttcaagcactcgggtcccctgaaacacctttgggccgattttcctccccgctggcgcccgatgttctctccggccctcgaaggactcgacattccggccgactcgctcttcgcctggcggcatgccgggctccccacaccgaacagcctcgtacacgttcccgccggagccgtcgccgggaaatacggcaccgtatcctcccacgccgcgacgatcgcggcagtcgtcgtaatgtcggccgccgtcatccgccgccgctggttcacatggctcgggatcgccgcagcgctgctgatctgctactcgcgcatctacctggccaaacacttccccgtcgatctgttgctcggcaccggcgtaggcatcctgacgggtcttttcatgctctggctctataaaaaatcgggaagaggctttttcaagcccctcgatccgagcgggacgcgacaggctgaatagctcccgaccagcttgcaccgctgatccgaccgctccggtcggcaccccgaaagacacagcgccctgccacctctccgatggcagggcgttttcggttcttcgttcgaaatcagccccggctccttttcaataacggcaccaaccgcaccaagcaaaagagcgccgccaacagtgcgatcgcacccccggcataaccgatccgggcaatcgaagcgtgcgtacagacgaatcctcctacgagggccccggcaccgattccgacgttgtaaatccccgaatagacggacatggcgatcgccgtcgcctcgggagccagacgaatgatctccgactggaaaaccaggttgaaaatcgtaatggccaacccccagcagatacacagggcgacaaccggaaagtgcccgaaagccgaaaggcgcagcaacagcaggaaaaacgcaatacccacgacggcaaaccgcatgaaggcgtagggacatttttcataatcgcgcgaaaaccacaggcttccgacgatccccaccaacccgaacgccgtcagcacccaggttatccagtcgttgtccagcccggccacctgtgccaggaacggttcgatgtaactgtaccccgtatagtggcccgttaccatgagaacggtcagcacatagacgcccacgagggcggggtttcccagcagggaaggcaccttgcgcagcgaaatggtgtcgcggctcgggacccggggaaagatcgccgccagaaacagccaaacggccgccgcgaccgcagcaatgaagaagaaggtcgtccgccatcccacgtaaagtccgatcacgcgacccagcggcagaccgacgatcatggcaatcgacgttcccgtgataatcaatcccaatgcagccgattgcgctcccttcggtgcgacgcggaccgccagcggcgaaacgatcgaccagaacaccgcatgcgcacaagccacaccgatccgcgaagccatcagcatcgcataggaagacgaaagtcctgacaacacgtggctcgcaatgaaaagccccagcaccccgagcatcagccgccggcactccatcctcgctaccgcgagcatcaacggcagcgaaaccagcgccacgacccaggcatagaccgtaatcaacaatccggcccgggcctcggtaatcccgaaatcggccgcgatgtcgctcaacaggccgatgggaataaactccgacgtattgaacacgaaagtacaacacatcaacacgataaccggcatccactcccgcagggcgatacggctgcgggtccatccgtttctcttcagcatagtcaattactcaaagcagtcaatactgaaaaataccgggtgtcgcccgggcaaagccccgccgctcacggatcctgtctgcgggttcgtcccggccgcagcaacagacggccacaaacgcatatcggatcgctccggagcaaaactgcgccaccctgttcggacagaatccgatccgccccccgcaaaggagattcaggaaccgtccgatgcggacagtacatccggcgcatactttttcagcggggcaaaaataaccgatattttgccgttttgtccgtcccatcccgattttctcgtccggcaggttccgaaacttccggggttcacccgtttcaaatccgaaaaacgagggacgcatccttgcagaatgcgtccctccccgaaacagttatcactccaaactcagaatccccactcttcgggcacggggatccgtgtcttcacctcttcgggaacctcggggaagaaggtcatgcccatcttctcctcgatgaagctgaccggcaccgcgatacggcgcaattccgcgcgggcgctggtttccggactgtcggtgaaggtctcgatccagaaaccgacggcctgcaactcatcggccgtacactgctgaatccgtttacccgtgctgcccgacttcgtacgcaacgccatcttgaactgatgggtcggcatcgtacagagtttctgcgccgggtccggctcggcctgattggagtccgaagagtcgtactcctgccagtaatcatgctcgtagtaacagcccgccaccacgaaaagcgtatcggaaacgatgttcatattttgcacgccgtcgtcggctacaatatcgttttcgctgttccgcgtcccggcaaagagcgcctcgacatacccccagactgttccgaacgtaccggctttggcactcggctgcggagcgatgttggtcggatagaacgtctgcatgttgatctgctggttcgcaccgccgcgttcgctcgacatgcagagatgtcccttcccccaatatcccgaccgctggagataagccatcgtattgctcgtccaatactgatagggatccgaaccggagggaccgtccttgcggtaaatcttcgactgatacgccacatcgagcgacggatccgccgtccacggatcgggatccgtacgtccgaagccgccctcgcggtagcaggcatgcatcggataggcgacccaaatcgggttatggcgccgcgtatcgtaacaataggagtaattccgcaggtttttccgcgtattgacggtctgcgtccaatgcgtaaagaaggcataatcgcccgaaacgacagcctgggacgaagtcggagcggtccaattggacggcagctcggggaaccggtagtcgccgccgtccaaatcgaccgtctgtccgcccggcccggtcgtgagcttcaagtcgtcgaaattgacgccgtagctctgcgaaccttgcggcgtaaagcggatgaagagccgctgtacgggaacagccagggtaaaatcgacggagatctgttcccagatattataagccctcgatccggtataatcgatccgctgccaataggagccgtcgccgctcaactcgatcagacagtcggccgccgtgaacgaagcgcccaaagagagggtcagatcgacctggtcgggcgtaagcgcgatgtcattcacgatgaaatacggaccgttgtcgaaccagatacggacgtagttcgcacccgaagctcccggatagcggcccgacgatccgaaattatcgttattgatacgagtccgggcggaggtataggtcacccctgccgcccccggaccggtcggattctgccatgcggcgctcgcatcggcccatcccgaaaaaggcgtctgatcgaagtcgtcgtaataaatcgtctcctccggaacgggaatctggttctcgcatgtaatctcgacctgccgcgtcacggtctgctcgccttcgccggcggtcactgtaattacggatgttttacccgcaggagccgccgtaacggtaatcgccccgtcgttctcgcccgatgccggagaaaacaccagcccttcgtcgctcgcaacggcgctccacacggtattcgaccgcacctgaacggtattggccgaagcgtcgtcgggatcgaacgtcagtttctcgggagcaagttcgagggtcggctcgagcacggcttttccacgggttatccgcaccgaattactcttcagttgcgtaccgttattataagtatggaccgcttcgatttcgatgctgctatcatcgggcatctgttcgacccgaaaagagccgctgccccggccggacgatgcactgaacttacatccggcagccgacggcttcacctggagcacccaggtcagtccgtcggtcacagtgaccgtgaactcgttttttgcaggatcctgctcgtcgaaaacaagactcgacggcgacaaagccaactgatccgccggaggtgtttcgtccaccgaaccgctgtcgctgcacccgccgcagcacacagtcagcagaacaaacagacaggcagcccgaaaaggccgcaaaaaagcagtaaaattggaggtcataggcaaaataatttggttgaatgaattgataggataaaaataacgcctttttagcttatcgtttctcgcattccatacataattcctcgcaaaaagtacattattgcccgaaaaaagagtatcccgcatcgttttttcccggtatcagcccgtcctgcaagcccctccgcaggcaacttgccgaaacgtcccgtcctttccgcagtttcgccgggaaatccgcccggacaaaataatctccgatccatcgcaaataaatttggcactgcccggggcttttgctatctttgtatttaagataggatgcggttcggacaagtccaaacggccgacgatccaagcggatgtgcggagtacgctgccgactcgtcctgcaaggagaagaaataccgaaagctttcgatgaacggaagcgcagcctgcaagcggtctttgccgggtgtagccggtaaagacagaagttcggagtcgagtttggcccgtcgcccgcctttcactatctttgcaaattcgaaatcaacacccaaaaacattcaatatgagcatcgaactcagtgaacaggaacagttacgacgccaatcgctcgccgcactgcgggaactcggcatcgacccctatcccgccgcccgctacgaggtgacggccacggcacgcgaaatcgccgagaatttcgatccggcgaagaataatttccagggcatccgcatcgccggacgcatcatgtcgcgccgcatcatgggcagcgcctccttcttcgaactgcaggaccacacgggccgcatccaggtctatatccggcgcgacgacatctgtcccgaaggagatccgacgctttacaacacggtgttcaagaaactgctcgacatcggcgacatcgtcggagtcgagggtttcgcattccgcaccaataccggcgaactgtcggtacactgccagaagctgaccctgctctccaaatcgctgcggcccctgcccgtcgtaaaggagaaggacggacagaccttcgacgccttcaccgaccccgaaatccgttaccgccagcgctacgtcgatctgatcgtgaatccccacgtacgcgaggttttcatcaagcgttcgaagatcatctccacgatgcgcgaatatttcaaccagttcgggtacgtcgaagtcgaaaccccgattctgcagcctattccgggcggtgcggcggcacgtccgttcatcacccaccacaacgcgctcgacatcgaccaatacctgcgcatcgccagcgaactgtacctcaagaagctgatcgtaggaggcttcgacggcgtatatgaattcggcaagaacttccgcaacgaaggcatggaccgcacgcacaaccccgaattcacggtcatggagatttacgtagcctacaaggactacctctggatgatggagttcaccgagcggatgctcgagaaagtcgccctcgccctgcacggcaccacgaccgtacagatcgacggtcgggagatttcgttcaaagccccgttccgtcgcctgacgatgacagacgccatccgcgaaaagaccggctacgatatcacggggcagagcgaagagcagctccgcgaagcctgcaagcgcctcgaagtcgagatcgacgacaccatgggcaaaggcaagctgatcgacgccatattcggtcagtactgcgaagaggagctggtacagcccactttcatcacggactacccgcgcgagatgtcgcccctgtgcaagcgccatcggtcgaatcccgatctcacggagcgcttcgagcttttcgtcaacggcaaggagctatgcaacgcctactccgagctgaacgacccgatcgaccagttggagcgctttcaggagcagttgcgtctttcggaaaagggcgacgacgaagcgatgttcatcgacatggacttcgtccgcgctctcgaatacggtatgccgacctgctcgggcatgggcatggggatcgaccgactgacgatgttcatgacgggcaacagttcgatccaggacgtgctcttcttcccgcagatgcgccccgaaaagaaagtcgtaaacgatcccgccgagaaatacaccgccctcggtattcccgaagagtgggttcccgtcatacagaaaatgggctacctgactgtcgattcgctcaaaaagctctccccgggcaagttcttcaacgacctgtgcggcttcaacaaaaagaacaaactgggactgaaagcgccctcgatggaggaggtcaaaaaatggtgcgaacaggagtaaactccgggcggtaatgacatcgggaagaaacatctggctcgcaggcatctgcgccgcaagcgtactcgctgcgggactccggctcggcgacatcgtacctggctgggtattccgcacactttgcacgttggcgctgggtacgatctggatccgcctcgggcagcaggtgtggcatcggttgcggcagcggcagcgcccctggttcctcttttggaactatgcacttcccgtactggtcgccatcccgacgctggccagcctctccgacggcgtcgttcctgtggaccagcggtttctggccgctgctgcgaccggagcggttctcgcctgcatctatcgtctaatctatcttaaaaacaaaaatatgagaaagaaaatcgttgccggcaactggaagatgaatacgcttcccgccgaaggcgtcgaattggccgaaaacatccgggccgacagaaaccaggtttgttcctgcgtgaatttcatcgtatgtccgcccttcacccacctcggcggagtcatcgaggcacttcggggttcggacatcgaagtcggcgcccagaactgcgcggccgaagacaaaggcgcctatacgggcgaagtatctgccgcgatgctcgcagccttgggctgccgttacgtcatcctgggtcactcggaacgccgccagtactacggcgaaacctcggcgacgctcaacaaaaagatggcgcaggcattcgccaacggtctgcaaccgatctactgcgtgggcgagaacctcgaggaacgcgaagcggaccgccacttcgacgtagtaaagacacagatcgaagaggtcatctacaacctcacgccggcccagttcgcccagaccgtaatcgcctacgagcccgtctgggccatcggcacgggcaagaccgcgacggcagagcaggcacaggaaatccacgcctacatccgcacgatcctgcgcgagaaattcggtgcggcggccgatgaaactcctatcctctacggaggttcctgcaaaccgtcgaacgccccggaactcttcgccaaagaggacgtggacggcggactgatcggaggagcggcgctgaaggccgccgatttcctggctatcggcaaaggttttccgcaaaaataattttcgtctcaacgtattgacagaccggataatatccggtctgtttttatttcatccgaaatctttcgctgaaaaaaaatcaaaaaaaagttgcattgtgaaaaaaaacacgtacttttgcatccaaagaacagtagaaatgacaagattttcgacgcagaattggtggtggcgctctttgtttgaggtaaacaatgagtccattggtatttgtatgaaataagccgagaaaatccgatccatacagtcaaaaatatcaaagcgttgtttgccgagcagacaacgctttttcgattctacacgatacgatacttaaaattaaaaaatacaataataaacgaattggttatgaaaacgaagaaaatcatcctccccgaatcccaaatgccgactcaatggtacaacatcgtcagcgacatgaaaaaccgccccctgccgccgctgaacccggcgaccaaagagccggtgactctcgagcagatgagcgctattttcgccgaagagctgatgaaacaggaaatgtccaccgaacggtacatcgacattccggaagaggtgcaggatctgtacaagatctaccgctctactccgctggtacgtgcctacggactggaaaaggcactcgacacccccgccaagatctatttcaagaacgagagcgtatcgcccgtcggctcacacaagaccaacaccgcgattccgcaggcttactacaactacaaacagggcatccgccacctgaccaccgaaaccggtgccggacagtggggagccgccatgtcgatggccacgcagcatttcggcatcgacctgaaggtctttatggtgaaagtcagctacaaccagaaaccctaccgcaaactgatgatgaacacctggggcgcagacgtgtatgcctcgccgagcgaaattacggccgccggacgtgccgccctggccaaaaatcccaacgattcgggcagcctgggtatggcgatctccgaagccgtagaactggcgctgcaaaatcctcaagatacccgttactgtctcggctccgttttgaaccacgtactgttacaccagacgatcatcggcgaagaggccgtcaaacagatggagctgttcggagaatacccggacgtagtgatcggttgcttcggcggcggcagcaacttcgctggcatcagcttctcgttcctgcgcgacaacctgaccaacggcaagaagacccgcgtaatcgccgtcgaaccacagtcgtgccccaaactgacccgtggtaaattccagtacgacttcggcgacgtagcaggtttcactccgctgcttccgatgtacacgttgggccacaacttccatccgtcggatattcacgccggaggtctgcgctatcacggagccggttcgatcgtgagccagctgctgaaagacaaggtcatcgaagcccagtccgtgccgcagacggaaactctggccgcaggcgttctcttcgcccgtacggaaggtatcatcccggctccggaatcggctcacgccatcgcacaggcgatccgcgaagcgaaacgggcgaaggaggaaggcgtttccaaaacgatcctcttcaacctctcgggacacggacagatcgacctgtacgcctacgaacagtatttcgccggaaaactccgggattacgaaatttcggacgacgaaatccgcagtacgctcaacgagttggaaaaaattatctaacagcgtaactttttgttactaaattttaacgaaagctgcggatgaaatatttcatccgcagctttttcatcctcgatctgtccattcatccacaaaaaactgaacaaagagcttccgcgcccgcaagtcttcacctcctcccgatgcggtccgctatccctcttttatagaaaatcgtctgtccaaccggctgtaacaagcaatacgatacgtctcatcgacagtaactcctaaaacgaaaccctcgcaacaccacgtaatgaaggagtaacctggagtcgagtcctaccattaccgatgcagtgaacgccgacagaaccggtatcacctttaccccagatttaccctccgcccgccgaacggtccgtacaagaatcgcattggcaccgacacggtatagattattaaattcccttgcacaaaattccgtgcaaaccagaatgacaaccgaataaatgaaaaaactatagcgatttcgatcgggttaaagttgtgaaaccgttacgaaccaaaataacgacagtcctgggaataccaagcaacggaatcagtttcagcggccaaaagcgccatgcatccgaaaaacagatacgaaccgggcgtgaaacgaaaccgggaacaaggagccatcacaacgaaaaaaagatatggaaaggcgcgtcgaaatcggcctgaaaagagatctatgccgcttcgatttttccgaatgatccgaaacgaaaaaatgaattcaggtccgacggcaccatagaaaaaggacgatgtcgaaacaccgtcctttttcttccaacgttattcggaattacatcttcttgcccacgttggtcttcttggcaaccttcggagcagcgactttcttcgcaccggccgcagccttggaagcagccggcttcgcagccgcagctttcttggcagccggtttcgcagctttcttctcctcgccgccttcagtggccggagctgcttcggcagcagcatcggcagccttcttaccgcgcgagcgacgggtcttgggtttcgcctcggcagccgtcggaagaatacccaacgtgtaagcctcgttgaaatcgacaaattcgatgatgcacatatcggcggcatcgcccaaccggaatccggtcttcaggatgcgggtgtaaccgcccggacgatcggcgattttcggagcgatcgtgcggaacaactccgtcacggcctccttctgcttcagatacgagaatacgatacgacgcgaatgggtcgtgtcctctttcgacttggtcaccagcggctccacgaactgcttcacagccttcgccttggcaacggtggtctcgatacgcttgtgcagaatcagcgacgacgccatattcgacaacatagccttgcgatggccggcctgtctgcccaggtgattgaaattcttattgtgtctcatttaagttagtctttatcaagtttgtagatagatacatccatgccgaacttcagattgagcgacgcgagcagctcgtcgagctccgtcagcgacttcttaccgaagttgcggaatttgagcagatcgttgcgattgagtttcaccaggtcacccaccgtatccacatcggcggctttcagacagttcaaagcacgaacgctcagatcctgatccgaaagtttcgtcttgaggagttggcgcatgtgcaggatatcctcgtcgaactcctccgcaccgttcgtatcctccatattcacggtgatcttctcgtcggagaagagcatgaaatgttggatgagaatcttggctgcttccttcaaagcatccgtcgggtgaattgatccgtcggtagtaatctccaaattcaacttctcgtagtcggttttctgttcgacacggtagttctcgatcgaatatttcacgttcttgatgggcgtgaaaatcgagtcgatcggaagcgtaccgaactcacaatcggcgggagtattctcctcggcaggcacgtaaccgcgtcctttgccgatggtgagcgtgagttgcattttagtaccgggtgccagatgacagataaccaattcgggattcaataccttgaagaacgagaggtagttcgaaatatatcctgccgtcagctccgttacacccgccacattgaccgataccttctcggcatcctggttatcaaccgtgcggataaaacgaacttgcttgagattcaggatgatgtcgatcataccttccatcactccagggatagcggcaaactcatggtccacgccggcaaccttgacggtcgtaatcgcatacccctccagcgaggagagcaggatacggcgcaaagcgttaccgacggtcataccaaacccaggctccagcggtcggaattcgaactttccgaacgacgaagtggattcgagcatgataaccttttcaggtttctgaaatgctaatattgccataatattgaattggttgtttaattactacttggaatacaactcgacgataagctgctccttgatgttttcgggaatctcctcgcgctcgggacgctgcaggaacttgccggccatagccgcaccgtcccactcgagccaagcgtagcggctcttcgaaccgccggccagagatccgacaatgacttccaaacttttcgacttttcacgtaccgacacgatgtcgcccactttgagcgagtaggacggaatattcaccacgttgccgtttacgcagatgtggcagtgcgacaccaactggcgggcagcggcgcgcgtcggagcgatgcccagacgatataccacattgtccagacggcattcgagcagcttcagcaggttctcacccgtgataccgcccatacgggcagcctgctcgtacgtacgggagaactgtttctccagaagaccgtacgtagccttcgccttctgcttctcgctgagctgctggccgtactccgatacttttttgcgcttgcgtgcaagaccgtgctgtccgggagggaaattccgcttctcgagaactctgtccgcaccgaaaatagcttcgccgaactttctggcgatcttggatttaggtcctatatatcttcccattgtattaactttttaaaatcagataaaatagttcttacgtaacacctgcgggccgaattatacacggcgacggttaggagcacggcaaccgttgtgcggcatcggagtaacgtcgatgatctccatcacctccaaaccggctccgtggatggtacgcacggcagactcacggcctgcacccggacccttcacgtaaactttcaccttacgcaaacccatgtcgtaagcaaccttcgcacaatcggcagaagccgtctgcgctgcatagggagtatttttcttcgaaccgcggaaacccatcttacctgccgaagaccagctgattacgtcgccgacctcgttggtgatggtgatgatcacgttgttgaaagtagagtgtacgtaggccatacccacggcaccgaccttaacaaccttcttcttgactgttccagttttctttgccataactctctaattattacttcgttgcctttttcttgtttgcgacggtcttcttcttgcccttacgcgtgcgggcattgttcttggtgctctgaccgcgaaccggaagacccagacggtggcggataccccggtagcagccgatatccatcagacgtttgatattgagctgtacgaccgaacggcattcgccctcgaccttgatacccatatccgcgatcttcgaacgaattgcgccgacctgttcatccgaccaatcctgaaccttgaggtcgtagctgataccggcctcgtcgagaattttgcgggcggtcgagcgaccgatgccgtagatatacgtcaggccgatctcgccgcgtttgttttttggtaaatctacacctactatacgtgccataaaatttctctttctttaattaatcgtttaaacattacccttggcgcattttaaacttgggattcttcttgcagatcacataaagtttgcctttacgcttcacgatcttgcaatcctcgcttctctttttgattgatgcttttactttcatggttttcaagcaatctaatggttatttgtacctaaacgagatacgccccttactcaaatcgtaaggcgtcatctccactttcactttatccccgggaagaatcttgatgtagtgcattcgcatcttgccggagatatgggccgtgatcacgtggccgttatccaactccacgcggaacatcgcgttggacaacgcctcgatgatcgtaccgtcccgttcgatcgcagtttgttttgccatagagtcttacttatttattgcctgttcgataatactgaaatccgtcagaacgtccggtccgtccttgcccaccgccaccgcgtactcgaagtgagccgccggcttgcggtcgcgggtcgtaaccgtccaaccgtcccgttcgaaaaccaccgccttggtgcccatgttgatcatgggttcaatacagatgaccattccctgtttgagaagcggtcctctgccgcgtgcgccgtagttcggaacacccggggcctcgtgcatcttacgccccagaccgtgtccctccaactcccggacaacgccgtagccgaaactttcggcatactcctgcacagccgcggaaatgtcgcctacgcgatttccagccttggcctgtgccgtacctttgcgaagagcctctttggtgacttccatcagttgccgtacttcctcggcaacttctcccacggcgaacgtataagccgaatcaccaacaaaccccttcataaacgtaccgcaatccaccgatacgatgtctccctcacggagaactctcttggatgacggaataccgtgcaccacctcttcgttgatcgaaatacacagcgaagcggggaatccctggtatccgagaaaagcaggaactgctccgtgcgaacggatgaaatcctcggcgagagtatccaactccttggtcgtaacgcccggtgcgatgtggcgacccacctcggccagcgtccggctcacgagaagattgttctcacggagcagctctatctcttcttcagtttttaagtatatcattctttcagaactctcttgaacaacaattagtagcggccctgaatgcgtcctgtcttcatcagaccgtcatagtgacgcatcagcaggtagctctctatctgcttcagagtgtcgaggatcacaccgaccataatcagcagcgaagtacctccgtagaaataggcgaacgcctgctgaatgttcaggaacttcatggccagcgccggcagaatcgccaccagagccaggaagatggaaccgggaagagtgattctcgtcatgatggtatcgatatagttcaccgtcgccttgcccggctttacacccgggatgaagccgccgttgcgcttcatatcgtcagccatcatttgaggattgataataatcgccgtgtagaaataagtaaaggcgactaccaggatgccgagcgtaaggttgtaccagaagccgcgcatgtcggagaatgccgcagcaaaaccgggcgcaacattggcgaacaacatcggaataaacatcagcgcctgtgcgaagatgataggcatcacgttcgcagcattcatcttcagggggatgtactggcgtacacctccgtactgtttgtttccgacaatacgcttcgcatactgaacggggatcttacgaacggcctgtaccagggcaaccgtagccatgaagaccaggaacagcaacaccagttcgaggatcagcatgatggcgctaccgtcggaggtctggaagcgggcgttgatctcggcgagcaatgcgtgcggcagacgggccacgataccgatcatgataatcagcgaaataccgttaccgatacccttgtcggtgatcttctcgcccagccacatgatgaacatggtgccggcgatcaggatgaccgtcgcatacgcaaggaaaaggaacgtgtttccgtaaacgaatgcctcgggtacttgatggtacaggttcgtaatatacgcaggaccttggatcaacaggacgatgatcgtcagcatgcgcgtccactgattcattttgcggcggccgctctcaccctctttctgcatcttctggaagtaaggaatcatgatgcccatcaactgaatgatgatcgaagcggtgatgtacggcatcactccgagtgcaaaaatcgccgcattgccgaatgcaccgccggagaatacgttcaacaggcccagaagaccgttgccctccaactgactggcaagcgccgacccctcgcccagggcgttggggttgatgcccggaatgaccacaaaacagcccaagcgatacacaagcagaagacccagcgtatagagaatacgcttgcggagctcctcgatcttgtatatgttcttgagggtttctacgaatttcttgttggtcgccagcagcgcgatgatcgcgactacgacgataccaacaatcagataaccataaccattcataatattgggttttgcgggttattacaatttttccacgttgcctccggctgccgtaatcgcagcttcggcactcttcgagaaagcgtgagccttcaccgtgagggctttcgtaatcgcaccgttacccaggatcttcactttgtcgttcgaagagatgaagccggcagctaccagcgtgtcgatcgtcacctccgtcaggtttttcttggctgcgagttcttcgagcgtcgaaaggttgatcggcttgaattccactcttttcagattggtgaagccgaacttcggcagacgacgctgcaacggcatctgaccgccttcgaaacctaacttacgcgaataacccgaacgcgactgggcacccttgtgaccgcgcgttgccgtaccaccgtgtcccgaacctgcaccgcggccgattcgtttatcgtgatgcgttgatccctttgcgggcttgagattattgagttccatcgtttatcagttcttaaacattttcaattatttaacctcctcgatcgttacgaggtgcttcacacgctccagcatgcccttgatgatgaccgaatcttcatgctcgacgctctgacggatcttgcgaagaccgagtgcatcgagatttttgcgctgctgtgcagtggcgccgatgcggctcttaacttgagtaattttcaatcttgccatagtcttctttccaattaaccgttaaacacctgattcatcgagataccgcgcaactgtgccacgctgtgagcgtcgcgcagctcgcagagagcggcgatggtagccttcaccaggttgtgggggttcgacgaacccttgctcttggcaagcacgttcttcacgcctaccgactccagcacggcacgcatggcaccgccggcgataataccggtaccgggagccgccggacgaaccatcaccagcgaaccgccgaaacgcatctcctgcttgtggggaatcgtaccgttgattacgggaatcttcaccaggtttttcttggcatcctccacgcctttggcaatagccgaagtaacctccgaagccttacccagaccgtagcctaccacaccattctcgttgccgacgaccacgatggccgagaagctgaacgtgcgaccgcccttcgttaccttggtaacacgctgaatgcttacgagccggtctttgagctcgaggtcgcttgtgcgtactttcttcatattggtatttgccatatcgctttagaatttaagaccgccttcacgagcggcgtctgctaacatttttactcgtccgtgatacaggtaaccgttgcgatcgaacgaaacggtcgaaatacccttttcgatagcgcgtttcgcggccagttttccgaccagggctgccacgtcgattttgttcttgcccgcagcctcggcagctacttccttgtccagcgaagaagcggtcgccagggtcacgccggccaggtcgtcaataaactgcacgtagatctgcttgttgctacggaatacagtcatacggggatgctcggccgtaccgctcacgattttgcggatacgcatcttgatcctctctcttctttctattttagtcaatgccataatttactcaatgtttattatttagcacctgcagacttacctgccttacgacggagttgttcacctacgaacttgatacccttgcccttgtacggctccggcttgcgcagcgagcggagcttcgcagcgacctggcctacgagctgcttgtcgatgctcttcagcgttacgatcgggttgccctttttctccgtaacggccgtagcggtcacttcgggaggaagcatcaggtatgtatcgtgcgaatagccgaggctcatttccaggatattgcccttgacttcagccttgaagccgacgccgacgagctcctgcttgatttcgtaacctttcgaaacgccgatcaccatattgttgatcagggcgcggtacagaccgtgcagcgaacggtgacggggttggttggtcggacgcgacaccagcacggcaggaatctctttctgcgtatgaacgtcggtgtgcgtacccacctctactttaatgtctgaatcaaccttctgactcagtgtcccaagtggtcctttcacgcttaccacgttatccggcgataccgtaacggtaactccggcaggcaagtttacaggtaatctaccaattcttgacatttgtgttgttgttatttgatgttagtaaatatagcacagtacttcgccgccgacgttctctttacgagccttggcatcggtcataatacctttcgaagtcgaaaggatggcgattcccaagccgttcatcacacggggcatcttctccacggaagcgtactggcgcagaccggggcggctcacgcggtgcagattcttgatggcattggatttggtcgccgcatcccacttgagcgcgatcttgatggtcgggtggccctgttcgttggtgtcgaacttgtaagccaggatataaccctgctcgtagagaattttagtgatttcctgcttaatttttgagccaggagcttcaaccactttgtggttggctttcactgcgtttctaattcgggtcagaaagtccgcaataggatctgtcataatgaattaaaagttaaaaattaataaaaatatgttactctttggttttcagccgtttgaattacctccaaaatacattcaactcgctttgcattcccttgcgccctgatttccgacgcctgcaaaaggcactttttcacggacatacgcgggtacaaagcgtgcaaatataggaataatttctcaataatccacaattaagtcctaatttttagcgaattaagacctcttccggaaaacagagcatgtcagcatccactggagccaacatgtattctgcgcaaaatcccccggaaaagtcctctccgcacgtcgtcgaaacggaccgaaaaaccgctttacagccaatcgctccccctcgtcttcgtcacaggactcaacggttgaaaatttgcatccaagtgccgaacctttcgaaagtccctccgccgagaagttaccacctgcacggtggcactttcctcgactttgcgacaattctacttgggctctacacccgtataggattcacctctttcgtagttcccagaccgaaaatcggtcctcaaacgggcccctgcgcacgcacgaccggcgtaccggaacctgactacaacgggcatgacaccctcaatagatgaatctctcaatgcgcctgcttccgacgctcctttcggagcctcttccaccggcagaatacgctttcttgctacctgtccggaaacctcacggcttccagccccggtcgctgcggacagggaatccctccgcagcggcggtcgagacaggcaagaacactaccagctcgccttcttaacgccggggatcagaccgttcgacgccatctcgcggaactggatacggctgatgccgaactgacgaatatatcccttcggacgacccgtcagtttgcaacggttgtgctggcggatcggattcgagttgcggggcagcttcgacagggcgatccatgcctcctcgtgatccatttcaccgctcttcaccttggcagcgatctcatcgcgtttgtgctgatagcgctttgcgagtttcgcacgcttcacttcgcgtgccttcattgactcttttgccatagcttattggttgttctttttagcgtttttgaaaggaagaccgaactcacgcagcagggcataagcctcttcgtcagtcgcagccgtcgtaacgaacgtaatctccatgccgaagatcttggtgatcttgtcgatatcgatctccgggaagatgatctgctcggtgatgccgagggtgtagttgccctgaccgtcgaacttctcgttgatacccttgaagtcgcggatacgcggcagagccacggcgatcaggcgctccaggaactcgtacatcttgcttgcacgcagcgtcacacgaacgccgatgggcatgcccttacgcaatttgaagttcgagatatcctttctcgacttggtctgcacggccttctgaccagcgatgagcgaaagctcctgctgagccacgtcgataagtttcttatcggcgacggcctgacccataccctggttaataacgatcttctcgagtttcggacactgcatgatgctcgtgtagccgaactccttcataagggcaggtacgatctgctccttatactgtgtcttgagtgtaggtacgtatgctgccattatttgatctcctcccctgactttttagcgaaacggactaatttacctgccgcattctgcttgcgaccgatacgagtgggtttgccgctcttcggatccagaacctgcagattcgaaatgtggatcgccgattcctgttcgatgataccaccctgaggattcttcgcattgggcttggtagccttcttgctgatgttcacgccctcgacaatggcacgctgcttctgggcatcgaccttcaggactttgccctgctggcctttgctgtcgcccgcgttgacgtaaaccatatcccctttcttaatatgtaatttaactgacatatctgaatgtgtgtttttaagattacaatacttcgggagcgagggagatgatcttcatatactgatcgcgaagctcacgagcgacgggaccgaaaatacgggtaccgcgcatttcaccctggttgttcagaagcaccacggcgttgtcgtcgaaacggatatacgatccgttggcacgtctgatctccttggtcgttctaactacgactgccttcgatacagcacccttcttgacatcgcccgaaggagaagcgctcttgacagccactacgattttatcgccgatcgacgcgtagcgacgcttcgtgccgccaagcacacggatacaaagcacttcctttgcaccgctgttatcagctactgtgagtctactttcttgttgtatcataactacttcgctctttcaatgatttgtactaatctccaacgcttcgtcttgctcaacgggcgggtttccatgatacgtacggtatcgccttccttgcaggtttcgtccaggcactcggcgacgaacttcgtcgtcttgttcacgaacttgccgtagatcggatgctttaccttacgggccactgcaaccacgatggttttctccattttgttgctgacaaccaccccaatacgctcttttctaagatttctttccataacggtaattaacatttagggtttttctgacgcagaattgtcagcatgcgcgcgatgtctctgcgggattttttgattatagacgggttctcgatcggcgaaactccgtgctgcaacttgagtttcgaaagctgcgccttctccacgtcgatgcgctcctgaagctccttgaccgacaggtcctttatttctgcacttttcatcttgatagcttagattgatgtttcaacgaaatctcgtcttacaatgaacttggtagtgataggcagcttctgggctcccagacgaagcgcttcctgagccactgccaggggcacgccttctgcctcgaagagaatacgaccgggcgtaacaggcgcaacgaacccttccggattacccttacccttacccatacgcacctcggccggtttcttggtgatcggtttgtcggggaagatgcggatccagagctgaccctcacgtttcatataacgggtgatagcctgacgcgcagcctcgatctgacgaccggtaatccaagcggaatcaagtgctttgattgcgaacgatccgtatgcaagttggttacctctttgagcgatacccttcatacgacctttctgcattcttctaaatttggtcttttttggctgtaacatggtgttcttgctttaaaaggtcctacttactgttattattacgtttcggagcaccgccgcgacgctctccgcgatcgcctctgggaccgcgacggtcgccgcgaggaccgcgacggtcgcccgaaggctggcccgcgccctgtgccgaagccgaagcgccggcgatctcgaacagatcgcgcttgccgtaaaccgtaccctggcagatccataccttgacacccaggatacctactttcgtaagcgcctcggtcaggcagtaatcgatgtcggcacggaatgtatgcagcggaatacgtccctctttcatcgtttcgctgcgggccatctcggcaccgcctacacgtccggaaacctggaccttgataccttcggcgcccatacgcatcgtcgatgcgatagcggttttcacggcgcggcggaacgatacgcggccctccaactggcgggcgatgttctgtcccacgatcacggcgtcaacctccggacgcttcacttcgaagatattgatctggacctccttaccggtgagtttcttcaactcctccttgagtttatcgacctcctggccgcccttgccgatgatgataccggggcgggccgtcgcgatcgtgaccgtaacaagcttcagcgtgcgctcgatgatgatcttcgagatgctcgccttcgccaaacggacattcagatacttgcggatcttggcgtcttcgaccaatttctctgagaaatccttacctccgaaccagttggagtcccaaccgcggatgatgccaagacgatttgctatcggattaactttctgtcccatttgattacttgttttctacggttaccattttgtcaactacgatcgttacgtggttcgaacgcttgcggatacggtgtgcacgaccttgaggcgcgggctgaatacgcttcagcatgcgaccgccgtcaacaaatatctcctttacacaaagtttggtatcttccagacgttctccctcgttcttggcctcccagttggcgatggccgacttgaggagcttctccagacggatcgacgcctctttcttcgagtagcggaggatacccagtgccttgttgatctccacaccgcggatgatgtcggccaccaaacgcatcttacgcggagacgtcgggcaatcccgcagaacggcgatagccttctgcttcttttcagccttcattttttcggctcttattgcttttcttgcacccattttctacctattttttcttgttacccgcatgaccacggaagttacgcgtcggagcgaactcgccgagtttgtgtccgaccatgttttcagttacgtaaacgggaataaacttatttccgttgtggacagcgatcgtctgaccaacgaagtcaggcgaaatcatacttgctcgcgaccaggtcttgatgaccgccttcttattgccctcggcttgagcgactactttcgcctcgagtttcgggtcaatgaatggtccttttttcagtgaacggctcattatgttactcttttaattattttttctttcttgaaataataaacttcgaggtcgtcttcttcggattacgagtcttgtaacccttagccaacagacccttgcgcgaacgcgggtgaccacccgacgcacgaccttcgccaccacccatcgggtgatccaccgggttcatcacgacaccacggtttctgggacgacggccgagccaacgctcacgacctgccttacccgaactctcgaggctgtggtccacgttggacacaacgccgacagttgcacggcaagttacgagtaccatacgagtctcacctgaaggcaatttgataacggcgaacttgccttcacgtgccaaaagctgagcataggaaccggccgaacgagccatcgcggcgccctgaccggggtagagttcgatgttgtggatgaccgtacccagcggaatctcgctcaggaagagcgtatttccgacttcgggagcgacacctgcgccgctcatgacggtctggccgacctgaaggccgttcggagccaggatatagctcttctcgccgtcggcatacacaaccaatgcgatgcgtgccgtacgattcggatcgtactcgatcgttttcacagttgcagcaacgccatccttcacacgcttgaagtccacatgacgatacatacgtttgtgaccgccgccgatgtagcgaaccgtcatcttacccgtattgttacgtccgcctgaacttttcttgacgctgacgagcgatttctccggtacgttcgtcgtgatctcgtcgaacgtgccgataatcttatgtcttgtaccgggtgttaccggtttaaactttcttactgccatctcttttagatattactgtaaaaatcgatcttgtctccatccttcaaggtgacgatcgccttcttgaagttattagcacggccttccagaagacccgccttggtgtagcggctcttgagtttgcccatgtagttcaccgtattcacatccgttacaaccacgttgtaaagctgctctacggcgttacggatctgcagcttattagctctaacgtcaacgataaaaccgtaacggttcagcttctcgccctgaatcgtcattttctcggtcagtattggcttaatgataatttccatttttcttgcgcgtgtttaggctaacattgtattcaaaatattctcggcaccctctaccatcaccagcgccgaagcgttcatcacttcgtacgtattgacgttcgaagccagaatggctttcacgtaggggaggttgcggcacgagagctgaagattgacgttcgaatccggcaaaaccagcaggactttcttgtcggcaaccttcagagcctcggccatcgctacgatcgacttagtcttgggagcgtccatcgaaataggctccaccacgcagatcgcacctgcctgtgccttgtaagtaagagcgctgcggcgagccagctgcttgagcttcttgttgagcttgaagctgtagtcgcggggaacgggaccgaacacgcggccgccgcctacgaacagaggcgatttgatgctgccgcaacgagcaccgcccgtacctttctgacgcttgagcttgcgggtcgaaccggccacctcgttgcgctgcttggatttatgggtaccctggcgctgatcggcaagatactgcttcacgtccaggtagatagcgtggtcattagcctccacgccgaaaacagcgtccgaaaggaccactttacggcctgtctcttttccttgtgtgtttaatacagctaattccatactatttctcaattgttaaataagcaccctttgcccccggaatcgaacctttcaccagaatcaggttgttctcgggaataattttcaaaactttcaggttcaaaactttcacctgctcaccgcccatacggcccggcagacgtttgcccgggaatacgcgcgaaggataggacgatgcaccgagcgaacccggcttgcgctgacggttgtgctgaccgtgagtctgaccgcccacgccgccgaaaccgtgacgcttcacaacgccctggaagcctttacccttggagatccccgtcacatcgacccagtcctcttccgagaacatatcgacggtcagcgtatcgcccaggttcacttcaggcatatccttaaactcagccatcttgcgtttaggggtagtgccggctttcttgaagtgtcctaacaaactgccggtggtgtgcttttcacttttgtcgtcataggcaatctgaaccgcttcgtaggagtccttctccacggttctgatttgcgtaactacgcacggaccagcctcaatgacagtgcatggtatgttcttaccctcggcactgtaaacggaagtcattccgattttctttccaataagtcctgacatttttgtcaaattacgtttgttaatataaagtataaagtgatcttcttagaactgtcgggaacatttgcgatcccgtagcggcaaaacgtgccggaaagggctgccgcaccggctcgacaccgggcggcggcacgatccgaaacaggtttcgatcagtctatcagaccttgatctccacttcgacacccgaaggaagctccagtttcatcagagcgtcgatggtcttgggagtcgatgaatagatatcgaggatccgcttgaacgtgcagagctggaactgctcgcgcgcctttttattgacgaaggtcgagcggttcacggtgaaaatctgcttgtgcgtcggaaggggcaccggaccgctgactacggctcccgtgctcttcacggtcttcacgatcttctcggccgacttatcgacgaggttatggtcgaaagacttcagtttgattctaattttctggttcatatgtttttcttattctaattccttacgtttaccacttgccttctcgatcacctccttggcaatgttcgccggaacttcctcgaagtgcgagaactccatcgaagaggtggcacgacccgacgagatcgtacggagcacggtcacataaccgaacatctccgacaggggcactttggccttcactacgcgggcattacccttcgactccatacccgtcacctgaccgcggcgcttgttcaggtcgccgatgatgtcgcccatgttctcctcgggcgtcaccacctcgacggacatgatcggctccttgatgaccgaaccggccttgggagcggcgttgcggtaaccgttacgggcgcagatttcgaaagacaactggtcggaatcgaccgggtggaacgaaccgtccttcagggtaaccttcatcgagtccatcgtgtagccggccaatgcaccgttcgccatcgctgcggcaaaacctttctgtacggcgggaatgaactctttcggaatgttaccgcccttgacttcatccacgaaggtaagacccatcgtgccttcgtcggcaggaccgatttcgaaaatgatgtcggcgaacttaccgcgaccgcccgtctgcttcttgaacacctcgcggtgctgaacggtcttggtcagcgcctccttgtagttcacctgcggagcaccctggttgatctccacgccaaactcacggcgcagacggtccacgatgatgtcgaggtgcaactcacccataccgctgatcacggtctggccgctgtcctcgtcggtatgtacggtaaaggtaggatcctcctcggccagcttgcccagggcaatacccagcttatcgaggtctttctgcgtcttgggctccacagccaaaccgatcaccggctcggggaaggtcatctgctccaatacgatgggtgcatcttccgcacaaagcgtatcgcccgtgcgaatctccttgaaacctacggctgcgcagatatcaccggcctctacaacctccaacggattctgcttgttggagtgcatctggtacaggcggctgatgcgctcacgcttaccgctgcgggaattaagtacataagaaccggcatcgagcttacccgaataaacgcgtacgaagcacagacggccgacgaacggatcggtagcgatcttgaacgccagaccgcagaacggatcctctacgctggcatgacgcacttcctccgcatcggtcttgggatttatacccctgaccgcaggcacatcgagcggcgacggcaggaatgccatcacatagtcaagcagcttctgcacgcccttgttgtggaacgacgagccgcaaagcatcggcacgagctgcatggaaatcgtagctttacggatcgcagccaggagttcgtcgggagtgatcgaatcgggatcctcgaagaatttctccatcagcgcatcgtccgtagcggcgacttcttcgatgagcttggcacgccattcggcagcctcggccttcatcgactcgggaatctcgcgaacctcgaaattatcacgcacggtcttatcgtcgaaataataaatcgcgttattatatataaggtctatcaaaccttcgaacttgtcctcgacaccgatcggaagaacgaccggaagtgccgtagcgccgaagtgctccttgatctgagagcaaacggccaggaaatcggcacccgtacggtccatcttattgacgtaaccgatacgcggcacattatatttgtcggcctgacgccaaacggtctccgactggggctccacaccgcctacggcgcagaacgtggcgatagcgccgtccagcacacggagcgaacgctccacctcgaccgtaaaatcgacgtgtcccggggtgtcgatcaggttgatctggtactggtggcccttgtactgccagaaagcggtcgtagcagccgaggtaatcgtaataccgcgctcctgctcctgcaccatccagtccatcacggcagcaccttcgtgcgtttcgccgatcttgtgcgttttacccgtgtagaaaagaattcgttccgaggtggtcgtcttaccggcatcgatgtgagccatgataccgatattgcgagtataagttaaatctcttgccatctgtcgaatctcctaattaaaatctaaagtgtgcaaatgccttgttggcctcggccatacggtgcatctcctccttacgcttgaaagcggcaccctgctggttgtaggcatccacgatttcggcagcgagtttctcagccatcgttttaccggcgcgcttgcgggagtaaaggacaaggtttttcatagaaatcgaaatcttgcgctccggtcgaacctccataggaacctggaatgtcgcgccaccgatacgcttcgacttaacttcgacttggggcgtgatattctcgagagcctgtttccagacttccagcggagatttatcagcatccttcatcttcttgcccaccaactccagagagtcataaaaaatggtataggcaatactcttcttaccatccagcataaggttgttcacgaaacgcgttactgcgacatcgctgaacttcggatccggaagtagaattcgcttctttggcttagcttttctcattgttattggctaaattaatgttttgtcgtagtcctgatattacttcttgcctttagcgggagccgctgcacctgccttggggcgttttgcaccgtacttggaacgacgctgacggcgtccgtccacacctgcggagtcgagagcaccgcgcaccagatgataacgcacacccggaaggtccttcacacgaccgccgcgaaccagcacgatggagtgttcctgcaagttgtggccttctccggggatataggcgttgacctccttgccattggtcaatcttacacgcgccaccttacgcatcgccgagttcggcttcttcggggtcgtggtgtacacacgcgtacaaacgccccggcgctgcggacacgcggccagtgcgggggacttgctcttgtcctccagacgtactcggccgtttctcactaactgttgaatagtaggcatttcttactgtttttgtcctttaataaatggtttgaatttcaatctccattgtccaaaatggactgcaaagatacgcaaaaattccgaaccgccatatataagtgcaatattttttgccgttccagcccgatttttcagcattttagcccatttcagcccttttatcgattctttttatttatagaatttataaacatataacataatacttatatacaaatccgcaacttactgacaataaaacctatctgctctccgcgaaatagtctttcggcctccagccgacctcccgtctcaccaaaacacaggctccactacgacacccggacagctcatccgggtctttcaccccaattctccgaagcaaagggcaagcctctctcaatcaaaaaatttcgatccgtctccggcttccgccatctttccgtacaggaaggcgggaccggacccgaaacggaaaccgaggacatacgaactccgccgtacaacgaacaggggtcccgaaaagaggccgataaacgaagaatataaggagtatttacaaatgataccggatccggaaaacggagaaacaagttcaaagtcaaatccggcccgtcgcttcctttctccatttacagaagacagaatacggtccggacaagtttggctcgccccccatctttcactatctttgcagaagatcgaatacgtctcggaaaactgcgagcaagcacccattttcttccggctttcactatctttgcagaagacaggaggctgttcggaaatcttggagaataaattctcccgatttcgccgggctttcactatctttgcccctgaaacgaaaacaattcaaacctatggagtacaatttcaaagagatagaagccaagtggcagcgccgctggcaggaagaggaaacctatcgcgtggaagccgatcccacacgtcccaaattctacgtgctcgacatgttcccctacccttcgggtgcgggtctgcacgtcggacacccgctgggctatatcgcttcggacatctactcgcgctacaaacggctttgcggcttcaacgtacttcatccgatgggctacgacgctttcggcctgcctgccgaacagtacgccattcagacggggcagcaccctgccgtaacgaccgaacggaacatcgcccgctaccgggaacagctcgacaagatcggcttctcgttcgactggcaccgtgaggtccgcacctgcgatccctcctattacaaatggacccagtgggcctttctggagatgttcaaacactactacgaccgcagtacggacaaggccgaaccgatcgaaaaactcgtcgcccgtttcgaggcgcagggcaccgaaggactcgacgccgcctgcacgcaggagatgcgtttcacggccgacgaatggaaatccaaaaccgaagaggaacgcgaacagatcctccagaactaccgcctggcgttccgcgccgacacgatggtcaattggtgtccgcagctgggcacggtactggccaacgacgaggtgaaggacggactctccgaacgcggcggctttcccgtcgaacagaagcagatgaaacagtggctgctccgcgtaacggcctacgcccagcggatgctcgacggactggaacggctcgagtggagcgactcgctgaaggagatccaacgcaactggatcggccgttcggaaggcgcccaggtcttcttcgacatccagggctccgaccgaaaactcgagatattcaccacgcgtcccgacacgatcttcggcgttaccttcatggtcatcgctccggagcacgaatgggttcacgaccttaccacgcccgaacaacgggccgccgtcgaggagtacatcgcccaggcgaagaaacgctccgagcgggagcgcatcgccgaaaccaagcgcgtaagcggtgtagcgacaggctcctatgcgatcaaccctttcacgggcaaggcgattccgatctacatttcggactacgtgctggctggctacggcacgggggcgatcatggctgttcctgcccatgactcgcgcgactacgccttcgcccgccatttcgggctggagatcatcccggtcgtcgagggcggcgacatcgagaaagagtcctacgacgccaaatcgggcaaactgatcaactcggatctgctcgacggactcgatgtaaaggaggcgatcggtcgcatcctgggcgaaatcgagcgacgcggattgggccgccggttagtgaactaccgcctgcgcgacgccatcttctcgcgtcagcgctactggggcgagccgttcccgatctactacaaggaaggcacggcctatccgctgccggaagagcggctgccgctggagctgccgccgatcgacaacttcggcccgaccgaacagggcgaaccgcccctggcccgcgtcaaggagtggacgacgcccgaaggctatcccctcgaagtatccacgatgcccggattcgccggatcgtcggcctactacctgcgctacatggacccgcacaacgaccgggcgctcgtgggccgcgccgccaacgaatactggcgcaacgtcgatctctacgtcggcggcatcgaacacgcgacagggcacctgatgtattcgcgcttctggaacatgttcctctacgacctgggatatgtctgcgaaccggagccgttcaagaaactcgtcaatcagggtatgatccagggccgttcgaatttcgtctatcgcgtggtcggcaccaacaaattcgtatcgctcggactgaaagaccagtacaaaacccaggagatccacgtcgatgtgaacatcgtgcgcaacgacatactcgatctcgacgcgttccgcgcatggcgccccgaattcaaggatgcggagttcatcctcgaagagggcaggtacgtctgcggctgggcgatcgaaaagatgtcgaagtcgatgttcaacgtcgtgaaccccgactacatcgtcgataactacggcgccgacacactgcgcatgtacgagatgttcctcggcccgctcgaacagtcgaaaccgtgggacacgaacggcatcgacggcgtgcataaattcctgcgccgtttctgggccctcttctacaaccgcgaaggacaactgatccttacggacgaaaaagccacggataaagagctgaagacgcttcataaaacgataaaaaaggtgcgcgaggacatcgaaaatttctcgttcaacacctcggtcgccgctttcatgatctgcctgaacgagttgggcggctgcccgaagcgcgagatcctcgaaccgctgaccgtgctgctcgcccccttcgcaccgcacatcgccgaggagctgtggcacacgctgggacacacgacctcggtctgcgacgcgcaataccccgtctgcgaggagaaatacctcgtggaaagttcgttcgaatatccggtttcggtcaatggaaagctgcgtttcaaaaaggaatacgccctgacgctctccccggccgacatccaggcggacatcgtacgcacggacgaagcgcagaagtggctcgaaggcaaggccccgaaaaagatcatcgtcgtaccgggcaaaatcatcaacatcgtaatctaaacgaccgctctgcggaatatgcgattcgggggagaagcgaaaacttctcccccgaatcttttaaccgctccgcgatcaggcgatcagaccggacagatgaaatttacgcttgcagtagcgttcgcactgcatcgaaatatcataacccaacatgatgcccagcatgaaatcctcctcgggagtcagtttgttcagcggtttatcgacgaacgtctgcacggcgtccaggcagctacgcttgccgaaatagagattgaccttctgctccgttaccggctgcaacagatagtcgataccctgactgcgaagccgttcgatcagcagcccggcacaggtcgggcacagcgtgcagagcaccagatcccgaacgcccttacggaattcgtagatatgatgcagcagcatcttcatattgtcgtatcggctgaaatccccggcactcatggcattcggttttagccgatggcggcgatccacaactccatccgcatctggttctcggcgtccgacgcgctgtcgtccacggcccagccgatcgcctctccgtcctgacacagccgcgaaccgcaccccggatactcctcggcgtcgaatcccccgacgaacgtgcagcccgtcgaagccagtccgtcccgaatttcggccatcgcatcgcagaaagtatcgctgtaaatacccgcatcgccgcagccgaacagcgccacgcggcggccggagaggtcttccttccccaacttgtcgagaaatcccggccagtcgtcctgcaactctccgctgccccaggtcgatgaccccaacagcagcagatcgtatttcttcacatcttcgacggacgcagccgccacattatgcacatcggcctgtgctacgccgagccgctcggcgatcctggcagctacggactccgtagtcccggtcgtgctgccgaaaaaaattcctgtcatctttttatttggttttatgagtgaacttcctgttgcaaaggacgcggattttccgacggcggacaaccccgcgtattggggattttcccggggcgccctccccggaaaatgcgtcgccatatatggggataaccgataatccgaagcggaattccgacattcaccgcgcagcacggtcttgccgggagagcacgggccgggacaaatccaaataaatttggcattgctccccgcttgcactatctttgcataagataggggcatctcggaaatctttgggaataaattctcccgatttcgctcggctttcactatctttgtacccaaattaaattatatggcagacaattccatactcaccagactggacggtctgaagctcaaatacgaagagatcggccagaaactcaccgatcccgaagtgatcgccgacgtcaagcagttcatccaattcaacaaggaataccgggagctggaaccgatcatcgaagcctcggaacgctaccgcacggccatcgccaacctggccgaagccaaagacatcctggccaacgacaaggacgaggagatgcgcgaaatggcacgcggggagatcgcggaactggaaccgaagatcgaaaccctcgaagaggagatcaaactcctgttgattcccaaggacccgcaggatgcgaaaaacgcgatcgtcgagatccgcggcggcacgggcggcgacgaagccgccatcttcgccggcgacctgatgcgcatgtacaccaaatacatcgaatccaaaggctggaagtacgaaatcacctccttctcggaaggcacggccggcggatacaaggaggtcgtgatgaaagtcacgggcaacaatgtctatggtacgctcaaatacgaatcgggcgtacatcgcgtgcagcgcgtaccccagaccgaaacgcagggccgcgtccacacctcggccgcttcggtggccgtgctgcccgaagccgaggagttcgacgtagaaatctcgatgaacgacatccgcaaggatatcttctgcgcttcgggccccggcggacagtcggtcaatacgacctactcggcgatccgcctgacgcacatcccgaccggtatcgtcgtgcagtgccaggaccagaaatcgcagctcaagaacttcgacaaggctttcgaagaacttcgcacccgcgtcttcaacctcgaatattcgaaatacctcgacgaaatcgcctcgaagcgcaagacgatggtttcgacgggcgaccgttcggccaagatccgcacctacaactacccgcaggggcgcatcaccgaccaccgcatcaactacacgatctacaacctgtcggccttcatggacggcgacatccaggactgcatcgaccatctgatcgtagcggaaaacgccgagcgcctcaaggagagcgaactctaacacacctccgacatggcccttcccgaaggattcgacgcggaagtctattcggtcgtggcgcaaattcccgcagggcgcgtaacgacctacggacagatcgcccggctgatcggcatgccgggatatgcccgccgcgtgggacatgcgctggcagcggctcccgccggacttccctgccaccgggtcgtgaacagcgcaggcagaaccgcaccccattggacggagcaacgtccgatgctcgaggcggaaggtgtccgcttccgaaaaaacggctgcgtcgatctgacccgctcgggctggaaggaggtcactctctgaaagcaatattccgtggccgaaacccgttctgcggataaacgaaccgtatgaaaaaacagctcatactcctgttcacactgatcttcaccgggatcttttccgctgcggcgcaggaccccatatacgtagtcaacgggcaggtcgtaagcgacatccgcaacattccgcccggcgacatcgaatcgaccgagatgctgcctgccgacgagcagaccatcgcccgatacggaacagaagcctcgaacggcgtgatactcatcaccctgcgatacgacaccccggcccgcttcccggaagcagacggcagtttcaacgactatatttccaaacagaccgattgggatgattctctgccggctgcacgggtagtcctgcgttacaagatcacgaccgacgggagaaccgtcccgaccgacgagctcgaagcgaccgaccgaaggctgcggcgccgtgtgatcgacgccgtcgaaaaagcaccccgctggcagcccgccatgcgcgacggaaagccggtcgaaagcgaaggggttctgcgcgtacaactgcccgaaggcaaaagcattccgcgtcccttggaattcatcatgcgctaaatccgaccaaaccctccgaaacttgaaaacgaactcactctccgcatggattctggccatccggccgtacagtctggggaattccgtcatcctcattctcatcggatcggccctggccttcaccgacggcggcttccgcccggtcgtcgctctgctgtgtcttgtcttcgccgtgacgatgcagtgtacggccaatctggtcaatgatctctgcgactttttgaagggagccgaccgccccgaccgactgggtcccgaccgcgctttcgccaaaggctacatcaccctgcgggcgatgaagagcggtatcgcggctttcactctggcggcctgtgcagccggagcgggattgctggccctcagcggctggaactggtggctcctgctggtgggtgcctcctgcattgtcttcgcctatttttacacggcaggcccgtggccgctggcctatcacggtatgggcgacatagccgtcatccttttcttcggcctgattcccgtcggattcacctactacctccagtgcggagggtggagcggagaaaccgccgtagtcggactggcctgcggcatggtgatcgacacgatgctcatgattaacaatttccgcgaccgggaggaggaccgccgctgcaacaagcgcacgatcgtcgtctgcctcggagccgcagcgggacgctggggttacctggttctgggcacaggagccatcctgctgtgcctctcgctgttggccgaaggccgtatcgccgcagctctgctgcctctgccctaccttgcagtccatatcgccacatggcgcaagatggtacgcatcgaccacggcgaagaactgaacgtctgcctcggcgaaacggcccgcaacatcctgctcttcggcgccctgctgaccgcaggcatcctgctcgacaaaatcctgtgctaacaacggtcggcacctactgtccccgccccgaccgcacttcgcagtgggtatcatgcccgatttccgaaattctgacgatcccaacccaaagtcgaacacaacgaccgtcgcacggcagaccgacggcgccatccccggaaaccgaccgtccccaaacgatcgacctgccggaccgagattcgccgccctcgcagaaaagagagcacggtccgcacaagctcgaaccaccggagatcaaaacgagcgcaaaggacgccagccgactctgcccggcgaaaagacggaaaacccataattaagttcggtgcatcgcccttcttccgttatcttcgctcaagatcggaggcggttcggcaatctttgcgtgcaagcccgcacgattgctctcacctttcactatctttgcagaagataggattcgcctcggaaaactgggaacaagttcccgttttttcccggctttcactatctttgtcgtcatgcaaaaccacctgacactctcccagctccaaaagctcgtcaaagcgacgctcgacgaagcgttcgccctgcccgtatgggtcagtgccgaaatcgcggagatcaaaatcaactattcggggcattgctacctcgaactggtcgaaaagggtggcgacaacggcgtgccgctctcgcaggcccgggcggtcatctggcgcacggcttacgcccgcatcgccggctatttcgaggccgaaacgggtcagcgactggccgcaggcatccgcatcctggcccgggtgatgatctcctaccacgaactgtacggtttctcgctcaacatcctggacatcgacccgaccttcacgctgggcgacatggagcgacagcggcagatcaccatcgagcggctccagcgcgaaggagtctgggacatcaaccgcgaaaatcctctgccgcaggtagtacagcgtatcgccatcgtttcgagccgccaggcagcgggctatcaggatttctgcaaggagttgggcaaaagtccctatgctttctccctgacgcttttcgacgctttcatgcagggcgccggtgccgaggattcgatcgtggcggcactcgacgccgtggccgaccgcatggacgatttcgatgcggtcgtactgatccggggcggcgggtcggccagcgacctgaactgtttcaatgcctaccgcctctgcgcccacatcgcccagtttcccctgccgatcctcacgggcatcggccacgacaaggatacgagcgtcgcggacatggtggcccacacggcacttaaaaccccgacggccgtcgccggatggctcgtcgaacggatgacgggcgtcgagggatggctcgacaccgccgcactgcaactgcgtgacgcctcggcgggcatcttccgccgccatgaactgcggctcgcggagctcggcagcgaaatcgcgcatcaaagcgccctcctgctcctgcgtcgcaacgaacagctctcccgctggagcgacgagctttcggccgctgtcggcgagctcctgcggcggcaacacacacggctcacgaccgccgaagagctgatcgcaagccgttcgcccgaacatattctctcgctggggttcgccatcgtacaccggggcgatgaaaccgtcacttcggccaaagggctttcctccggcgacactctgcgggtggaactgtccgacggcacattcgatgcaaccgtaaaataagcaacctgacaatatggcaaagaaagagattacctataccgaagcgatgaacgaaatcgagcagatcctcgaccgcttccgccgcgaagagatgaccgtcgattcgctgaccaaggaggtcaagcgggctaccgaactgatcgccctctgcaaggagcggctgcaccggacggaagaggagctgaaaaaaatctccgaataagatgaaaaggctgattcgctgggcactcaaccacctgccccgcacgtttctgcaacgcatcgccggaatatcggttccggtgctgggatggttttatatcggccggggcgtcgaatgtcccgtctgcggcacccggcggcgcaagttcctgccctacggctacgtccactcccgtccgaacgccctctgcccccgctgcctctcgctcgaacggcaccgcctgctatggctctacctgcaacgcgaaaccgacctgccgaccgcgtacccccgcatcctgcacatcgctcccgaagtgtgcctgatgcgcaaactgcgcaaacattacgacggtcacccgggcctgtacctcaccgccgacctcgaaagtccgctggccgacctacatttcgacgtgcagcacattcccctcgaggacgattttacggacgtggtgatctgtaatcacatcctggaacatgtcgaagacgatcggcaggcgctgcgcgaactccaccgtatcctgaaacccggcggctggggcatcgtcctgtcgccgatggattcgtcgcgcgaagagaccttcgaagacgacacgatcaccgaccctgcagaacggacccgcgtcttcggccagtacgatcaccggcgcatctacggccgcgactacgccgaccggctgcgcagtgccggattcgaagtcgccgacatcgacttcgcagcctcgctcaccgaagccgagcgccgtctctacgccctgcccgacgaccatatttacgtcgtttacaaagtccgggagtaaccgacttccagcgagatttcccgccggtaccgatcgggcgtcctccccgttatgcggcggaactgcctcacgaacagtgcataactgttgaaccccgactcataagcgatctgcgaacaggtcagatcggaatgtttcagcaaccgcaccgcgagtccgatgcgcatttccgccaggtattcgaacggtgtcttacccgtcctctcccgaaaataacggcacagcgccgccggattccggcctgccgccgctgcgagcgcggacagcgaaacccgctcgcggaaatgggccgccagataaccttcgacggcatacatgggcgatccgggacaccacgaagcccggcatacacattcggccggcgaaatcagccggtaatccgcactgcgtgccaaccgtccgagaatttcatacagacgcaccagccgctccgtacccgacaacgcatcgaccgagcggatcaggcggccgacctcggccgccagcacccggtcgccgaaacgaatccccctgcgactgcactccagcaatctgcggatttcggcataatcccccagacgctccatattctgcgggaacaggtcgggcggaaattgcagaacctcgcccgaactcgcttcgccgtcccctcccaggcgcacccggtcgcacagatggaaatgaggcagcccgctgcctaacagcgccaaatccccggcccgataaggttccaccccatcgccggcgaactgcaacccccggcccgaagtgatgtacatgagttcgaattcgacatgggcatgacacggcagcgagaactgcccgtaacggatatggctgaaagccgtgccgggatcgtggagaatacgccgttcgagaattttcatcaaaaaagaaagtttatctgcaaatatagtatatctatccgcaaatataatacatttcacaacggctcgttccccctatttttgtcggaaacaaacgaactcatggaacgagaaaatctattatcccgttacggcacggctgccgaacgggtcgaacgagccgcagaaagcctccgccaaggccgcggaatcctgctggttgacgatgaaaacagagagaacgaaggcgatctgatctttgccgcgacaaatatgaccgtcgaacagatggccctgatgatccgccgatgcagtggcatcgtatgcctctgtctgaccgaagagcgggtccggcaactcgacctgcccccgatgtccaccgtcaatacgagccgctacggtacggcattcaccgtgtcgatagaggcggcggaaggcatcacgacaggcgtttcggccgccgaccgcatccgcacgatccgaacggccgttgcacccgacgcccgtcccgaatcgctcgcccgccccggccacgtcttccctctggcggcccgcagcggcggcgtactcgaacgcggagggcacaccgaaggaagtgtcgatctgacaaaactcgcgggactgccaccctgcgccgtcctgtgcgaactcaccaacgaagacggtaccatggctcggctgcccgaagtggtagctttcgcctgcgaacacgactttccgatcgtttcgatcgacgacatccgccgctaccggacggaacgggaagccgcacgcaccgacctataaataatacgacgcccaaaatctcctgtcaatgccgaatttcaccggaccgaaggagcctatgggatcaggctccgatacgcctgcacgaaccggtacggtcgcgaaggaatcgaccgcccccgctgcaaaccgacacggacagcccgatcgcctgaaaaccggtcggcacgaaccggcaaaatcggtcgtttccgcaggaaccggcgcgtgcaccgacgaaaaatccccggcctcgcggtcggggattttctcatccatgcgatcaaggattatttctcctccttggcagccgcttccatcgcgtccttgagttcggccagaccggcgatgtcacccagcgtggtcttctcgaccgaagcgttgatcttcttcatcgaagacttggtagcctcggcggaagccttcttctcggcagcctgctcggcccgctcggcacgtttagcctcttcgaaaagacgagtgtgcgaaagcgtgatgcgcttggtagccttcgagaattcgatcaccttgaacggcagtttctcgccgaccgtcgccgtcgtgccgtcctctttcaccagctgacgcatcggagcgaagccctcgacgttttcgcccagcgatacgacggcacctttgtcggtcatctcggtaatcgtaccttcgtgtacgctgtccactgcgaactgaccctcgaactcgttccagggattctcctcgagctgtttgtggcccagcgacagacgacggttctccttatcgacctccagcactacgacctcgatttcggcgcctaccgacgtaaattcacccggatgcttgatcttcttggtccagctcaagtcggaaatatggatcaggccgtcgataccctcctcgatctcgacgaacacaccgaaattggtgaagttgcgaaccttggccttgcatttcgtacctacgggatagcgggtttcgatatcggcccagggatcgggagtaagctgcttgatgcccagcgacatcttgcgctcgttacggtcgagggtcaggatgactgcctctacctcgtcgcccaccttcatgaaatcctgtgccgaacgcaggtgctggctccaggacatctccgatacgtggatcagaccctctacacccggtgcgatctcgacgaacgcgccgtagtcggccatcacgacaaccttgcccttcacgtggtcgcccaccttcaggttgggatccagcgcctcccaggggtgcggagcgagctgcttcagacccaatgcgatacgtttcttggcatcgtcgaagtcgaggataaccacgcggatcttctcgtcgagcgaaacgatctcttcggggtggttgacgcggccccacgacaggtcggtgatgtggatcagaccgtccacgccgcccagatcgacgaacacgccgtacgaagtgatgttcttgaccgtaccctcgaggatctggcccttctcgagcttcgacatgattacctgcttctgcgcctcgagctcggcctcgatcagcgccttgtgcgaaacgacgacgttacggaactcctggttgatcttcacaaccttgaactccatcgtcttatctacatatacatcgtagtcgcggatcggcttcacgtcgatctgcgaacccggcaggaaggcctcgatgccgaatacatcgacgatcataccgcccttggtgcggcacttgatgtaacccttgatgatttcgtccttctcgagggcctcgttcacacgatcccacgacttgagctgacgcgctttcttgtgcgaaagagccagctgaccgttcttatcctcggcagactcgacgtaaacctcgatcttgtcgcctaccttcagatccgggttgtaacggaactccgaaatggggatgataccctcgctcttgtagccgatattgacgaccacttcgcgcttgttgataccgatgaccgtaccttcggtcacctcgtttgcggcgatgttcgaaagagtcttgtcataagcctcgccgatctgctctttgggctggtcgtaaacgcccaggtcgttttcaaacgcgttccagtcaaagttctcgtttgcaactttttttgcttcttccatgtggaaattaaatgcgatgcaatcgctcgttaaatggttaataataaaacactcccctcgcgcatcgtgcgcatacggggagtgcaaagataggaagaaatcggcaatctgcaaactttcgaccttttttacgcagaaaatcaatgcgtatggacgggcagcggagccgaaggtacggccgggccgcgataggagcggatcaccagccccacgccgaagaagataaccagcgcgcagagcgccgtgtccagatgcagccggtcgaggcccatcgccaccgacaaaatcaccgccaaaacgggttgcaggtaggtatagatgctcgaaacggtcggctgcacgtatttgagcgaatagttcagcaacaggttcgggacatacgtcggcacgaagaccacgaacaacgtcgccagcaggatgtcggtatccatcgccgcgaaatcagtatgcaccaactcccgggcaccgaacggaagcaccatcagcgccgccagacaatagacccagcgcaacatggtgacgacatcgtacctggcgatcaactttttgaaccagaccatgtagcaggaagtagccagggcgcagcccgcgatcatcaggttgccgaccagtccggagtgcgtatgtccgccgctggctcccagcaggacgacacccaccgcacctgccatgcccaacaccagaccggcgatcttgaggcgcgtgaatttatcgataccgagcaccacggaaataagcagtaccagcagcggcgtgatcgtgtcgatgatcgatccgtcgatgggcgacgtgcgggacaaaccgtacatgagcagcaccttgcggattacgccgatcagcagggccgcaccgatcatcgtcttgatgtccttgcgggcgatcggcttcgccttgctccaaagcaaaggaacgagcgagaaaagtgccgccgcgcaaagcgaagcggtaaccagcgcgatcggggccacgtacttcgacagcacgaggttgtaaaagggatagtcgcatgcccagatgatgttgcacaacagcaacgccaaatgggacttcaccaaaagattcaacggagtcgcttgcaccatacgctaaagaagctgccgcctgcggatccagcaacctgccgaaccgtcgcggtttccctgcattccgggcaaataccgtgcaagacacaaccgacaagccggacacttgcgccgaaacgcctcggaaaatccgaccgtttcggccgaccctcagctccccgccgccaacaaaacgccggagcccgaccgccccggcgcataatacccgactcaccgatccccgtccttcgatgaaaggaccggatcaatcgtcgtcacgatcgtcgtggttctcccggtcatcgtgcagacctgcgaccgactgccggagcgtattgtcgggtgcgaggggtttgccgccgttggcgacgtattccatcaatacgtcgggcacgagccactgcgtagtctcgccgttcgtatattcgagtccctggtaattcttgaaaacatagtcgcccatcgccaccttgtatttacggccggacaccaacccgggaaagatcacctctaccgcatcgtacccgtcggtacggatcacgtacggtgcggtcgagaagaggtcgatccgatgcgactcgcccttattgaccgtgtcgttgtatttggtcagcaccattttgctcatctgttcgggcgtcatctccatcacgctgacagaagaaatgaaaggatccaggtcatatatgtcgctccgtgtcaggtcgcctttcgaaaggctgtcgcggcgaatccccccgtagtggtagaaagccacgtcgctgcccgacttgcgtttgagcgcctggaggaagatgttggccacccccaccttgtcggccgtagcggtcagctctccggccttctccttcagcaccggattgttgcggtaggtctcgaccatctcctgataaaccgggtcgggcgcgtagtcggccagcggaaccagccggaacgacagggaccggatctccttgcctcgcagtcgcacctcggtaacccccaccatgttcaggttgcggcccgtctgcgtgatgagcacgccgtcctccacctcgttgatccgctcgtggctgtgcccgccgataatcaggtcgtattccgaggcttcgtcggccagttcccggtcgtatttcgaaccgatgtgtgtcagcgccaccaacacctgacaactgtcgcgcaggtattcgtactcctcgagcgtccgcacggcatccgtaaaacgcaacccctcgaagatggcgtcgtggccgtccggatggttgttgtacccgtaattggtcaccgcagcgacgaaagcgaacttctccccttcgcgatcgagaatgacatagggtttcaactgcggaatcggcgagttctcgctgaccatgttggcgcagatcaccgggaaacggcaataaccgatcgcttcggccagcgtctgctgccccacgtcgaactcgtggttgccgagcgtggccacgtcgtaccccagctcgttcatcagctccaacacgggacgccgtccttcggcctggtccacataggcgttgcctgtccagcggtcgccggcatcgaccaggatcaccgacgccgtgtcccgacactcggcaacggccgtcgccaactgcggaaaattctggatttgggcatgtatatcgttcgttgataatatgataactactttttcacgaggtgcgcacgcacacaacgccgcacacagcaacagcgaaatacccaagaagatttttttcatcacaaatagagtttacgtttgtcaaagttaggaaataattgtatttttacgcgatttatgaacaaaaatatgtcagacacccttccggtcatctgcgaaaacgcaggacggacgatcgaggtcgcgatgggcacgaccctgctcgaagtcgaacggcagctccggctcgacgggccgcatccgttcctggccgcctatgtcaataaccgcatcaaggaactcaactacagaatatacaaaccggtaacggtccggttcatcgacatcacctccttcgaaggaatccgggtatatcagcgcacgatctcgttcatcctgcaaaaggcggtccgggagctgttccccgaccgcacgctctacatccggcactcgctgggggcaagcggtttctactgcgaaatatcgggcttcggaccgattcccgccgaacacctcgacgcgatcaaggcccgcatgcgagggatcatcgaccgcaacctgccgatccagggggtgaagatgctcaccgacacggcccgcaaaatctacgaagggttcggaatggccgataaaatcgccctgctcgactcccggccgaggttatacagcaaaatttatacgatcgactccctgccgggttatttctacggagccctgaccccttcgacgggttacactccgcagttcgacctgcacccctattacaacggcttcttcatcgccctgccgctgcggaccgatccgacgcggctgcaacagagcgtccaccaggagaagatgttcgacgtcttccaccaataccagtcgtgggtggagatcatgggcgttccgaccgtcggacagctcaactcgaaagtcctcgcgggcgacgccagcgagctgatcaagatcgcagaggcgttccatgaaaacaagctagcccaggtggccggctgcgtcgcggaggccaaccgcgaacggggcgtgcggctggtgttgatttcaggcccttcgtccagcggcaagaccaccttcgccaagcggctgggcgtacagcttcgggtcctgggactcaacccggtactgatctcgctggacgactatttcgtggaccgcgaaaagacgccacgcgacgaaaaaggagagtacgactacgaggcactcgaagcgatcgacctcgaacagttcaacgaccatctgaaacgcctcgaacggggcgagagcgtcgatattccgcgttacgacttcatttccggcacccgccagtggcacgacaaccccttgcagctcgacgagcggtcggtactgatcgtcgaaggcatccacggactgaacccggccctgacgcccggcgttcccgaatcccggaaattcaagatctacgtttcctgcttcacctcggtggccctcgacaacgtgtcgcgcatcgccacctccgacaaccggctgctgcgccgcctgacgcgcgactaccgcacgcggggcaacgacgccctttcgacgctcgcccgctgggaaagcgtccgccggggcgaggagaagcacatcttcccctaccaggagaatgccgacgtgatgttcaattcgtcgctcttctacgaaatttcggtcctgcgccgctttgccgaaccgatcctgcgggaagtacccgatacggtccccgaatacggcgaggccaaacgcatgctcaagttcctcgacaacttcatcccgatctctcccgaagagatcccgcccacgtcgctcctgcgggagttcatcggaggcagcagtttcaaatattgatcccgaacgaataaattcgaattacaaatcataaaaaaatcattctcaaaatcctatgtttgataaattttccgaccgccacatcggcgtcaccaatcccgaggatttgaaagcgatgctcgccgtgatcggcgtcaaatccgtcgatgagctcatcgcacaggtcatccctcagtctatccgcctgaaacagccgctcgccctgccccagggcatgagcgaatacgaattcgcgaatcacatccaggccctcgcagccaagaaccgcaccctgcgttcgttcatcggcatgggttactacccctgcgccgtaccggccgccatcacgcgcaacgtcttcgagaaccccgcctggtacacttcgtacaccccctatcaggccgagatttcgcagggacgcctcgaggcgctgctgaatttccagaccgccgtcatttcgctgacaggcatggagatcggcaactgttcgctgttggacgaaggcaccgcagccgccgaagcgatgctgatgatgttctcgctccgctcgcgcgaagcggtcaaggagggacgcaaccagcttttcgtcgatcgtaacatcttcccccagacgctcgacgtactgatcacccgcagcgagccattcggcatcgaactggtgatcgacgactacaatacatatgaattcaccggcaaggagttcggcgccatcgtacagtaccccgccgccaacggcgaggtgcgcgactacgccgccttcaccgaagcggcccatgccaaaggcgccctggtaacggctgttgccgacctgctgtcgctggccctgctgaaggctccgggcgaatggggggccgacatcgtcgtcggcacgacgcagcgtctgggtattccgatgggcttcggcggcccgagcgccggctacatgaccacgcgcgaagcgtataagcgcaacatgccgggccgcatcatcggcgtatcgatcgaccgtctgggcaaccgtgcgctccgcatggcgctccagacccgcgaacagcacatcaagcgcgagcgtgccacctcgaacatctgcaccgctacggcactgatggcttcgatggtcggcttctactgcgtctataacggcgccgaaggtctgcgccgctcggccaagacggcccacacggcagccgtaacggtagccaaggcgctcgaagcgatggactacaaactggcagccaagaacttcttcgacacgctcgaagtagaggcggaagccgccgtcgtacagtcgctggcgctcgaacgcggcatcaacttcttctatccttcggaggatcgggttcgtttctcgttcgacgacgtgaccacccccgaggaggtgaacgaggtaatcgccatcttcgccgaggccaaaggcaaaaaagccaaggccgtcaaactgtcggaggagattaccatcccggccgcgatcctgcgccagtcggagttcctgaccgaacgcgtcttcaacacctaccgctgcgaaagcgacctgatgcgttacatcaaacgcctcgagctgcgcgacatctcgctggcaaattcgatgatctcgctcggctcctgcaccatgaaactcaatgccgcagccctcatgcagcccctgtcgctcgccgggttccagaacatgcacccgttcgctcccgccgaccagaccgaaggctaccgcgaactgatcgacgggctggccgccgacctggcgaccatcaccggcttcgccgcctgctcgctgatgcccaattcgggcgccgcaggcgaatacacgggactgatggtgatccgcgcctaccaccagagccggggccagggctaccgcaacatcgtcctgatcccctcgtcggcacacggcaccaaccccgcttcggcggcgatggccggcatgaagatcgtcacggtcgactgcgacgccaacggcaatatcgacgtggaggacctgaaggccaaagcccaggagcacagctcggagctggcctgcatgatgatcacctacccctcgacgcacggcgtattcgagagccgcatccgcgagatcgtggatgccgtacacgacgccggcggacaggtatatatggacggcgccaacatgaacgcccaggtaggcctcacgaaccccggctacatcggtgcggacgtctgccacctgaacctgcacaagaccttcgcaatgcctcacggcggcggcggcccgggcgtaggtccgatctgcgtggcggagcacctccgcaagttcctcccctcgcattcgatcgtccccaccggcggcgacgaaggcatcacggccgtggcatcggcaccctggggttcggccatgctcttcccgatcacctacggttacatcaagatgctgggcggcgaaggtctgaaagcggctaccgagatggcgatcgtgaacgccaactacatgtcgtcggccctcaagtcggagtaccgcacctactattcgggtgaaacgggccgcgtgggtcacgagatgattctcgacctgacccacttcaagaaagactacaacatcgactgcggcgacatcgcccaccgtctgatggactacggcttccacgccccgacgctatccttcccggtacacgaaaccctgatggtcgagcctacggaatcggagccgaaagccgaaatggaccgcttcatcgccacgctcatccaaatcaagcgcgaatgcgaggaggccgccgcttcgggcgaagcggacaacgtggtggtgaacgctccccacacggctgccgaaatctgcggcgaatggtcgcatccctacacgcgcgaaaaggcagcgttcccgctcgaattcatccgcgagtcgaaattcttcccctacgtgtcgaagatcgacaacggctacggcgaccgcaatctggtctgccgctgcacggaataaaccgggactctgcatgaaaaaggagggacgcggactgcgcccctcctttttatttcaccccgaaggattcgagcctaaaaactcaacccggcacgcaggacgatacctcccagaccgctcgaagtgtcgggagcagtctgctgctgcacctggaatccgaagtcgatgttcagtgccaggacactccccaaaccgaatttcacaccgacggccggcgcagcataaataccgccgtgcttgtggatgccgtaaccgatatccactttcagatagggggaaatccgccggtcgaggaaataaaccttcatatcggcgaaaatcgggacgaacgaacggcctccgtcggtgtactccctgaaactatcgtccggcatatctccccgggcggaatagtagttccaggccacacccaggccgacgaacagtcgcgggccgatgcgcacgccgtggacggtttccaggacgaaacggtcgtaggcgttcgatcctactccgaaagcggtccccacaccgacctctccctgataacgaatcccctgcccgctctgcgcgaatactgcggggaagcaccacagcgccatgatccatgcgaagaataattttttcatcgttttcgcgttaataatacaatgtataaatccgtttatttcatcccgattgcaaaatccgggcgaaaatcgtatctttgtcacaattacactcaaataattttctgaaaacaatgaaagtagaaaaaaacaaaatggtagcggtcgattacaaactgaccgttgacggcgcaatcgcagaccagtcccagccgggcgctcccctcgagttcatctgcggaacaggcatgctgctccccaaattcgaggaggcgatcctgggcaaagagccgggcgagaaggttgccttcacgctctctccgaaggacggttacggcgaggtgatcgccgaagcgatcgtcgatctgcctaaaaatacattcatggtggacggcaagctggccgaagacatcctcttcgcaggttcgcaggtgccgatgagcgatgcacagggcaaccgcatgatcggtaccatcaaggaggtgggcgaagagaccgtgaaaatggacttcaaccatccgatggccggcaagaccctcaatttcgaggtcgaggtcgtttcggtacgcgacgtaacgcccgaagacctgcaatcggcaggcggctgcagctgcggttgcgacggcggctgcggcgatcatgagggaggttgcagcgaccacaagggaggctgcggcgagggctgctgccactaatccgacaccggaaaagcgttcccgtacgcttttcttcaatcctgcaagtggagagccttcggttttccacttgtttttatcttcccttcatcctgttatccatgctccattcgatccgccaattcatcgaggctcttcaagatccctatgggctgacccgcacgctgggagaaatcgaagtgtgccgttcttcggacggcgaccccctgcgctgggtcggcaacagcgcggtggttttcaaaatccgctgcggcagccggtacaaaatgctcaaatgctacacacggcctatggagcacctcgaagcgatctatcaagagaaactcctgcggcaagagctttacgtttggcaggccgacgggcagggcgagtggtgcgacgtggtcgtggacgactggatcgaaggaatcacgctctacgaatccgttatgcggagcgccgactccggcgacaaagcgcacctcagcaacttggcccgacagttcgaccgcctggcgctggaacttctcgaaagcgactgggcgcacggggacctgaaacccgaaaatattctgctggatgagagcggcacgctccgtccggtggatttcgatgcgatgtttcttcccgtcttcgccggagagaaaagtcccgagctgggcacggcagcctaccagcaccccggacgcacggcggaggatttcgacgcgtcgatcgacgactactccatcgccacgatctctacgaccctgcacgcgctggcgctcgaacccggactgctcgcccgctacaaccggggagagggactgctgctctcgccccgggaaatcgtccggcacggctgtgcggcccacgcagaatgcctcgcactgttcgaaaaggcgggcgacgccgtccgctatcgcatcgcccgggtgctcaaatccccgctgatgcgcctgccgaacttgaagccgctcgtccgatacgccgtttgcgggcccgaaactccggccgaccggggcgaactcttcgtccgggacggactgtggggtttcaaaatcggagaacgggaattgatcccacccatatacgacgccggtttcgacttctccgaaggcttggccgccgtccgcacgggacgctgctggcatttcatagactccaccggggccgtagcgatcgactgttcggactgcaacgcggtaaaaccgttcgcaaacggccgggcgatcgtcgtccgcgacggacaacgtctggccatcggccgcaaggaaccccgaaccaccttgcatatttgacggcgaacaactatctttatccgaagaatacctgttccgacagggttgtttcgcggcaatccgaaaaataaattttcgattgcccgtcgctttgactatctttgcaaaagatagaaggcgactcggacaagttcggacaagttcggacaagttcggacaaccgacggtcgaagcagagggcactcgtgaactctgccacgcaaaaaaagaaactaaaagggatgtttggctcgccgtccacctttcgctatctttgacatagttttagataggatgcgcctcgaaaaaccgggaataagttcccgttttctcccggctttcgctatctttgcagaagatcggaggcagttcggcaatctttgcgtgcaagcccgcacgattgccctcacctttcacgatctttgtcttcaatatttcgaatcgcaacgacgacatgacggaatacagaaaaccgacaccggccgaaatcgaggcgctcacggccgccggaaacagcgcggaaaattgggatgccatcgaagtcgcacaagacttcaccccggcccaactttcgggctgtcggctagaaggacgcgtacagatcgggcggggagcacggctgcgccgctgcaccatacgcaactaccgcatcggcgaagaggcgctgatcgaaggggttacggcgctcgaatgccgccgcgaatcctcgttcggcaacggagtccgggtcgccgccatcaacgagaacggcggacgtaccgtacggatctacgaccaactcaccgcccagaccgcctacatcctggccgtctatcgctatcgccccgaggctgtcgaagccatcgaacgaatgatcgaacgctacgccacagagcgccgcgacaccctcggtaccgttggtccgcacgcacgcatcaccggcgcccgtttcatccgggaggtcaatatcggggaaggagcgacgatcgacggagcatccctgttggaaaacggcacggtctgcgccggagcttatgtcggcatcgacgtccaggcccgcgatttcatcgccgcagaaggagcccgcatcgacggcggcacgcttctcgaacgctgcttcgccggcgaatgctgcacgctggacaaacacttcacggccgtcgattcgctctttttcgccaacagccactgcgaaaacggagaggccgtttcgatcttcgcgggtccctacaccgtttcgcaccacaaatcctcgctgctgatcgccggaatgttctcgttcttcaacgccggcagcggcgccaaccagagcaaccacctcttcaagagcggcgcagtgcaccagtccgtccacctgcggggatgcaaattcggcagcagcacctacatcatggctccggccatcgaaggaccctttacgctggtcctgggccgccatacgcagcatcacgacacctcggcgtttccgttctcctacctggtggaacaggacggacgttcggcactgatgccgggcgccaacctcaccagctacggcactgtgcgcgacatcgggaaatggcccgaacgcgaccggcgcaccgtcaaacgcgaccggatcaacttcgaggaggacaacccctatctggccggaggaatgatcgatgcggtcaataccctcaactcgctggcggaagcgcaccccgacgcggagagttatgtccacaaccacgccctgatccgctccacgcaactgcaaaggggcctgaagctctacaataaggcgatcgtcgcctcgctcggcgcgatgctccgaaacggcgaaccgggtcgtgcggacggcacgggccgctggaacgatgtggcggggcaatacgttccccgccgggaggtgaaacgcatcctcgacgccattgcgaacggcggcatcgattcgctggaaggcatcgaccgggcattcgaccggatagccgccgactacgaccattacgcccgcagttgggcggaaggggtgctcgcgcaactgctcggacacgctccctccccagaagagatcgcagaagccgtgacagccggagagcgaacccgcgaaacgctccgtaaatccgccgaagacgaccgggcccgcgactgctcgcccgccatggccgtcggatacggcgtggatgccgattcggaggaggagaaaatgcaggactaccacaccgtaagaggaatccgataatgtacacccaaagtatcacgcggagccaccgcacagccttcatcctggccatcgaccaatccggctcgatggcggagaaactcctattccggggacggcagaccaccaaggccgaagccgtcgccgaagtcaccaaccggctgctgttcgaactcatcgaacgggcccggcgcagcgacgaggtgcgcgactactacgacatcgcggtattgggctattcgggcgacggaatcgtatcgctgctgaacgatccggagccgctggttccggtatcgcggctggccgctctgcccgtcgatttcgcagaaacggtcgtggagcgccgcatgccggacggcgaagccaccttccgtaagatttcgatgccggcctggatcgctccgaaagcggtcggacagacacccatgtacgaagcgctgctgcaaatccgcgacctgacacaagcgtggtgcacgaatccggcccacagcgaaagttttccgcccatcgtcttcaacatcaccgacggggaagcctcggactgcgaccagcgcgaacagcttgcgatctgcgaaaagatccgcaccatcggaaccaccgacggcaaggtgctcctgatcaacatccatatcgccaccacgtccgactcacgttcgctgctctttccgaccgaagaggagattcccgccgacaaccgctacgcaagactgctgcacgactgttcgagtccgatgcccgaagagctttcggaggcgatccgacaggtgcggggcgatctggccaagccacccttccgaggaatgagttacaacacgtcgatcgccgaactcatcgccatcctcaacatcggctcgatcagcatcaaaatacagtaaaaagatgaccgttcccaccctttataacttcaccgaagcgctccaggctcccgatctggccttttcgacgctccgcgactgccgtccccgccggacggcgacgggaggagtagtcctgtcgcgcaccagtcgcttcgccgaagcggaaatcgaatggcagagccggaaatacctgctctgcttcccgctctcgacagcctcgatcttcgccgtcgaacagacagcggcccggcttcggtacctccggacaccgttgcttaccgaatacacgatcctgcgcgacgaaatgacctacacggacgacaccgggacgacccgcacctgcgatgtggtgctgcatcggctgcccgaagggcgccccctttcggtctgcgccgcagagttcgatgccgaatccctgcggtcggcgctcgataaactggaggcgggactgtccgagctgggcttcagccacaacaatctcaaacccggcaacctctacgtcacctccgacggacgactgattcccgtccggtaccatttcgcccgtttcggcgaaggacacgacgccgaaggattcgaacgtctgcgtcagttcgtgcgcgaacagggcggcaaggggcaaatgctttgcgacgcggaaccgtcccgctacaccacgctgcccgaatttccgggacatctgttcgtgggcgagatgtccgatcaactggttcgtgtggaagacgaaaccggctacgggttcgtcgataccgaaaaccgaccggttatcgcgccgcaattcgtctgggccgccgacttccgcgaaggacgcgccgaagtccagaccgcacagggcatgggcctgatcgacaaacggggacactacgtgatcgaaccccgctacgaaatcgtcgattacaacccctacacgggctgttctcgcattcggagcgaagggctctgggcgcttgccgactacaacggacgcatcgtcggcggattcacaccgcgctacatcgaagaaaacgaatacgtcgaagcttaataacttaacaaaaaatactctatggaaaacgtaaaatgtctgatcatcggcagcggcccttcgggctatacggctgcgatctacacctcccgggcgaacctctcgccggtactctacgaagggatcgagccgggcggacagctcaccaccaccaccgaaatcgaaaacttccccggtttcaccgaaggcatcgacggccccaaactcatggataacatgcgccggcaggccttgcgcttcggggcggatatccgcccgggcgtcattaccagcgtcgatctctcctcgcgcccgttccacgtcatcgtgaacggagagaaggagatccaagccgaagccctgatcatttcgaccggcgccgcagccaaatacctgggactgccctccgaagagaaattcaagggcatgggcgtcagcgcctgcgccacctgcgacggattcttctaccgcaagaaggacgtagcggtcgtcggaggcggcgatacggcatgcgaggaggccacctacctggcttcgatctgccgccaggtatatctgatcgtccgcaagccctacctgcgggcttcgaaagccatgcaggagcgggtaatgaacaccccgaacatcaaagtcctcttcgagcacaacacggccgaagtattgggcgatgaaaccggcgtaacaggcgccctgctgcgcgacaacaaaggcacggaaaccaaaatcgacatcgctggcttcttcgtggcgatcgggcaccatcccaacacggagattttcgcagaccaactggaactcgacgccgaaggttatatcaaaaccgtagcgggcagctcccgcaccagcgtcgaaggcgttttcgccgccggtgacgtgcaggatccccactatcgccaggcgattacggccgccggttcgggttgtatggccgctctggactgcgagcgtttcctgttacaataattcccagacaaagaaagggaacgaaccgtcaaagccgttccctttcttcgtctccggcagccggacggtttccgaccgttcgaaacccggtcttacaaaaccggcaggcggagaacacggaaaccctcgaactccttccaattcctgcagcatgggtttcgacgcggctgtcacccttttcggaaaggacgaggaagaacggaaggtatccattccctgcaaccctttttgattttaagggcacaggttttgacaggacgatgcgatggccggatgggcatacttttaagtattccccagtcggaaagagcgaaaaaggggcgaaagagtccccatatcctgccgcccttttttgattttaggggtgcagattttgacatgacgacggacgacacggaagggacatacttcaagtatctccctttcggggaggacgaggaagggcgaaagatgccctataaaatcgaaaaaagatgagtttcagcgtaaccatattaggctcggcctcggccaaacctacgcccgaccgacatccgtcggcgcagatcgtcaaggtacacgaacagcactacctggtcgatgccggcgagggcgcacaacagcaaatgttccgctacggaatcaatccgctgaaactgcgggcggtattcatctcccatctgcacggcgaccatgtcttcggactctttccgctgatctcgacgctggggctctacggacgccgcacgccgctcaagattttcggtcccgcgccgctgggcgaaatgctcggatgccacctgcgctacttcgacacgcaactgccctacgaaatcgaatgggtggaagtcgatacgacccggcacgccctgctgttcgaaaaccgcacgctcgaagtgtggagcgttcccctgcgtcaccgcatccccacctccggctacctgttccgggagaaacagcccccgctgaacgtccgcaaggagaaaatcacggaatacggactctcgatcgcccggatcacggccgccaagcggggcgaagatattctgctcgacaacggggacacgctccccaatgcggaactgacctaccggccttacgcgccacgttcatacgcttatctctcggatacgagctggtcgcccaaagcggcaaaactcgtcgagggggccgatctgctctaccacgaagcgacctacgcccacgccgagcacaagatcgcccgcgagcggggtcactccactgcggtcgaagcggcccgcatcgccctcaaagccggcgccggacggctcgtaatcggacactactcgtcccgctacaaggaagagagcgttctggtcgaagaggcccgcacggtatttcccgatacccacccggccaccgaaggcacaacattcacgatcgaaaaacggcagcaaccatgaccaaagccgaaatacaactcgtccgctcgctggccgacaaacgcagccgcaccgaacacgggctgttcgtagccgaaggacacaagttcatcggggagctgtgcacctccgccctgcgcgtccgcaagatattcgccctggaagggcttttcgagggcggcgaagtcgaaaccgtgtcttcgcgtgaaatggagcggctctcgctgctgaagaccccgtcggattcgctggcgctggtcgaaatcccgcatcatcctttccggcccgatacggcacaacgggagctggtgctggcgctcgaccaggtgcagaacccgggcaacctgggcacaatcatccgcttggcggactggttcggcatccccgagatcgtctgttccccaacgaccgccgactgctacaacccgaaggtcgtgcaggcgaccatgggggccatcctgcgggtcaaagtccactacacggccctcgaaccgtacctggcacaggctcgggagcggaatattcccgtttacgggactttcctcgagggggaaaacatctactcgacaccccttacgccgggcgggatcgtcctgatgggcaacgaaggccaagggatcgctccggccgccgcacgacacgtatcgcacaaactgttcatcccgccctatcccgccgaccgcaacggttcggaatcgctcaacgtagcgatcgccacggccgtcgtctgcgccgaattccgccggcaggcgagcgcaaagagataagacaagtccgaaagacgagagagaaccggaccggagagtcggcattcagccggcaaatccccgtccggtgcattttttagtttagcgacttttatctcctcggcgaacgatttcgggaaaaacgggaagtaattacgtcaaacacagacggttctacggcataagcccgacgccgggcgaacatatatcggaaaacagacaactgacagccgaaaaagaacggcagcgatacggaggaccggaatacctatcggaatttctccctcccccaagcgctccgtttcttagccgggcgcacattccgccattcttaaaaaacgccccacaccggccagcgacagaatatacactcctgtttccgagcgactaaaaaaccctctccgcaggatcgggagagggttcggaaccaacgcagaccgaaatcactccgcatacggcgatgcccagaaccatttgtcgttggtcgtcatgaaatgatactcccggtcgcaatcatagccctccggaatcagcgcaacataatagatcggatgcttgccttcgcaccaggtttcggtgtcgaactcgctccggtcggagcataccaggtaatagaggttcttggccatataggtatcgagataatgtttctgcgtctggggcgactcgttgttccagttggcatcctcgttcaggaaatagggacgcccgtcgcgcatccgctcccgaacctcctggatcgaaagcatcaccccgttctcatcgaccacgtaggcatcgaacgtgggatcgacccaaacccacttgtcgagcgtcgcggaatagacgacattaataacgtgacagtcattgaccatcttccggggcatgcaggtcacgaagcgcgacttgaaacccatcgccagatagcactcgttgagcacctgagccatcatacggcagttgattccccggttctccttgcggcacacctcgatcagatcgatcgcgttgcgagaggtcggattgcgggaactgccgtcgtgacgtaccgcattgtgcacccagtgcatcaggttccggatcttcgacagttcgtcgccgctgccggcgatgctgtccaggttgaaatactcccgcacccgcaccagatcgcggtcgttgggatcggcatagcggaaccggggaagagaatccgtcggcgcagaggaatcgtaaggccccgcctgccgcaagatccacatgaaatcgccctgctcacgagctttttctacagtctccgcatatcccctctcggagcggatattgtccagatcgggatcttcgatcatccaggagtaatcgcagttcccgcaatcgacataggccgcaaggctcgccacagccgccctgcgtttgttcagtcgggactgtgcacaagccaggttgtaatattcgcctctcaaatagccgccgtaattccactcgtcgagctgcgtccggacactatcgggcaatgtctcgaaaaggcggatcgcctcccggtactcacgctccgcttccgcatacctcttcgcttccatcgcccgattcccacgctcgcaacaggaatggaccggagctaacaactcttcaaaactctgggccggcgaagcggttatgcagaatgccgcaaccaccgataaaagcaactttttcatacacttccaatttaatgggttcaaaactttccgaaagatagaaaaaattcccccccccataattttcggcaaaaaaatttacatccggtcataatttcggcgcaaaatccgcgaactccgaaaaaatatcctatatttgtagattgaaacagagcgttttcgcccggcaaacagcgaaaagacggattccatcgtcggatcgcgtgcgcgaaaacggaacaaagaattttatttatgtcggaaaacagactcaaaataggcatcacgcagggtgatccgaacggcatcggctgggaagtcattctcaagactttcgccgatccgcgtatgacggaactctgcacgcccgtcatctacggatccctgaaagcggcggaattttaccagaaaaccatcgccgatctggaacccgtccccttccatatcgcctcttcgatacacgagatacgccggggcaagatcaacctgattctctgcggcgacgaaacgaagatcgagccgggtacggcctcgccggaggcgggccgggcggcagccgaggcgctccacgccgccgtgcgcgacctgcgggacgaacagctcgatgcactggtcacggctccgatcgacaaggagtcgatccagtcggacgacttccgctatacgggacacaccgaatttctggcggccgagctgggcggcgaacccctgatgatgatgtgcagcgacctgctccgcatgggattggtcacgatccacatcccggtcaccgagatcagccacgacctgacccggcagaagatcgtcacacggctcgaacagctgcgttcgtcgctcaaggcggatttcggcatcgtcgaaccccgtatcgcggtgctggcactcaatcctcacgcgggcgacggcggtctgctcggttcggaagaggaacacatcatccgaccggcagtcaatgaggcttacgaaaaaggcatactcgctttcggccccttcgctgccgacggattcttcgccagcggccactaccgggattacgacgcagtactagccatgtatcacgatcagggactcacgccgttcaagaccctctcgcccgacggggtgaatttcacggcctgcctgggcagcgtacggacatcgcccgatcacggcgtggcgttcgacatcgccggacaggacaaggccgacccgcaatcgatgcgcaacgccatctacctggccacggacatcgtgaacaaccgccgcgcctgggccgaatggacgagcaacccgctgccgcacgccgagcgcgaacggggcggaagggacttgtccgtgaaggacctgcccgatacggagaaagagagttaaaccggctgaacgcggctccgaaaaccgaacggatagtcggctccgtaaatcggacggcacgcactctcccgacggtcccggccgattcaaggcatagtgtcatacggcaacggagccgatccggacaagaaaccgcttcccggcacgttccttgtcacaagcataagcgacaatccggccctatccgcctgcgcggacaagcccgccggaaagccgcaggcaaaacagtaaaaccgggcgaaccggaggtgtattccgtctcgtaattgtggaagcgccgaaggccccaaaacaataatttacaaatgattaaaatcacctttccggacggcaacgtcaaagagttcgccaaagggactacggcttatcagatcgccgagagtatcagccctcgtttagctgccgactccctggccgcatcggtaaacggcgcgaccgtcgatctcaaccgcgccatcgaagaggacgcttcgatcaaattctacaagtgggacgaccccgaaggcaagcacgctttctggcacacctcgtcgcacctgctggccgaggcgctcgaagccctctatccgggcatcaagttcggcatcggcccggcgatcgagaacggattctactacgacgtggactcacccgtgcccatcaccgaagccgatctggaaaccatcgagaagaagatgatcgaactttcgcgcaacaaggagcaactcatccgcacggaagtatcgaaagccgacgcgctgaagaatttcaccgaaaagggcgatccttacaaagtggagctgatccgcgacctggaagacggcacgatctcgttctacaccaacggcgcattcaccgacctctgccggggaccgcacctgcccaacacggggttgatcaaggccatcaagctcacctcggtcgccggagcctactggcgcggcaacgagaagaacaagatgctcacccgcatttacggcatctccttccccaagaagtcgatgctcgacgagtatctggcgatgatggaggaggccaagaaacgcgaccaccgcaagctgggcaaggagctggagcttttctgcttctcgcaacgcgtaggccaggggctacccctgtggcttcccaaaggcgctgccctgcgcgaccgcctggaacagttcctgcgcggcgtacagaaggagtacggctaccagcaggtcatcacgccccacatcggcaataaggaactgtacgtgacctccggccactacgccaaatacggcaaggactcgttccagccgatccacaccccgatcgagggcgaagagtatctgctcaagccgatgaactgcccccatcactgcgaaatctaccgctcgaagccccgctcctacaaggagctgccggtgcgcctggcggagttcggcacggtgtatcgctacgagcagtcgggcgagctgcacggcttgacccgtgtgcgcggcttcacgcaggacgacgcccacatgttcgtacgccccgaccaactgctcgaagagttcgaaaaagtgatcgacatcgtgctctatattttcaaaacgctcaagttcgacaactatacggcacagatttcgctgcgtgatcccaacaacaaggagaaatacatcggatcggacgaaaactgggagaaggccgaaagcgccatcatccaggccgccaaggagaaggggctcaacacggtcatcgaatacggcgaagccgccttttacggtcccaagctggatttcatggtccgcgatgccatcggccgcaagtggcagttgggtacgatccaggtagattacaacctgccggagcgtttcgatctgacatacaagggcgccgacgacaagatgcaccgcccgatcatgatccaccgggcgccgttcggctcgatggagcgtttcgtagccgtgctgctggagcacacgggcggcaaattcccgctgtggctctcgcccgaccaggtggtcgtgctgccgatttcggagaagttcaacgactacgccgagaaggtcagcgcctacctgaacaagtacgacatccgctcgcaggtggacgaccgcaacgagaagatcggccgcaagatccgcgacaacgagctcaagcgcatcccctacctgctgatcgtcggcgaaaaggaggaagccgaaggactggtatcagttcgtgcgcagggcgaaggcgacaagggacagatgaccctcgaagcgttccgcgactatatgaccgatctggtcagccacgagatcgacgccaacaaaatggagcaaaaaaactaagtattaactaaatatttcaggaggacaaagctatagcaacaccacctcgtccattcccgccgcgaccatcgactcccgggaataacaattcacagaaaccgaggcttccaagacccggttttcaaccgaaaaaagcggataatccgcaccgtatcaacgacgagatcacggcaccccaggtgcgcgtggtcggcgacaacgtcgaacagcccgtcgtactcccgatccgcgacgcactcaagctcgcggacgagatggagctcgacctgatcgagatttcgcccaaagccgatccccccgtgtgccgcatcgccgattaccagaagttcctctaccagcagaagaaaaaggcaaaggagctgaaggccaaccaagcgaaggtcacgatcaaggagattcgcttcggaccgcagaccgacgaccacgactacaacttcaagttgaagcacgccgagaacttcctcaaggagggttccaaggtcaaagcctacgtctttttccgcggtcgttcgatcgtgttcaaggagcagggagaaatcctgctgctgcgtttcgccaccgatctggaagagctcgctaaagtcgagtcgatgcccaaattggacggcaagaagatgaacatgatcctcgcgccgaagtcgaaaaaataacgacagaccgagggcaacacgggctccgaccgtaaatacgacacaccccgagggagaaatcacattttcccttggggtgttatttgaatttacgacaccgaatatttcccgaccgaaccggaattggaattggggacccggagcacaagccgggaaattccgcttcgcacgattcgccgcaggcagagccgacaaccgggcagagaaggaggaaaacaaaaagttaagtttgacttgtcgcccacctttcactatctttgtagaagataggatacgcctctgaaaactgggagcaagctcccgttttcttttcggctttcactatctttgtagaagataggatgcgatttgacgatctctgcgtgcaagcccgcacgattgctctcacctttcactatctttgactgcgcttttaatctttcacctgcacgatgacgacaaccgacaatatcttcgccctcgaaccgggaaatacacccgctttcgaacggaccgcgctcgaaactttccggtttcaggccgaccggtgcgccgtgtaccgcgaatacctcgaccgcatcggagtcatacccgcagaagtgacgcggatcgaacagattccgttcctgccgatcgagctgttcaagcgacgcgaagtttatgccggcgaccggccccccgaaatcgtcttcacgtcgagcaacacgggcggcacgattccctcgcggcacttcatgcaatcgctggcccactatgaaaaggcgtttctcacggccttccggacgttttacggcgatccggccgggtggagcctctacggattgctgcccaactatctccagcgcgaaggttcgtcgctggtctatatggccgaccgactgatcgcagcctgcggttcgggcggcttttacctcgacgactacgaaaaactgctcgcggacatggcccgcgatccgaagcccaaaatcctgctgggtgtcagctacgcactctgggacctcgcggagcgatacgccccgaaattcgaaaatacggtcgtgatggagaccggcggtatgaaagggcaccgggaggagcttccgaaggcccaattccaccgcatcctctgcgaagcgttcggcgtagaaagcatccactcggaatacggcatggccgaactgacctcgcaagcctactcttcgggcagcggcatcttccgcacaccgggctggatgcgggtgctcgtacgcgacgtgaacgatcccttcgacatccgcccggcaggtgtgcggggcgggatcgacatcatcgacctggccaaccgctactcctgcgccttcatccagacgcaggacatcggccgcgtcttcgacgacggcagtttcgaaatcgaaggacgtatcgaccgcagcgacatacgcggttgcaacctgctggtacagtaaacaccggggcttcggtatctacgcaaaaagggattcctcgcaaaaacaccccgaagagggcggcctgaaaatcccgcagtcacccgaagatcgaaaaaaacggaaacggacaagaacccgaataaaatttaattgccaaacagcaaaaatgaacgagatagatttcgtaatcctgtgggtggacggcaacgatcccgcctggcgcgaagagttcgtccgcacacgacaggcggagaacgacgatgcctcggagatccgttaccgcgactggcgcaatctgcactactggttccggagtgcggaacgtttcgctccctgggtgcggaaggtgcatttcattacctggggacacctgcctgcgtggttacggcgcgaccaccccaagctgcacatcgtgaatcaccgggatttcatcccggcggaatacctccccacattcaattcgaacaccatcgaactgaatatccaccgcatcgaagggttggccgaccggttcgtactcttcaacgacgacacgtttcttacgcgcggctgccggccggaggatttttttcgccggggtgtgccctgcgacatggcacgcctgagcgtcgtacaaccttcgtcggtcgggcatatcatctacaacgacctggagctgatcaaccgcctgcacgataaacgcacggctatccgcacccacatcgcccggtggttctcgccacgctacggtatcgtcagcctgctgaaaaccctcacgctgttaccctggggcttcttcccgggtttcaacgactcccacatgccccagccctacctcacggagcgctttcggcaagcctgggaacgctggccccaggagctggacgcctcctgccgtcaccgaatccgctccttgagcgatctctcgcactggctcgtccgttacgacatgctggcctcgggagctttcgcgccccgctcgatggccgactgccggttgatgaccctcacggacgactcgctcgaaagcatctgccgcgacatcgaacagcagcgctggcggatgatctgcctgaacgacagcgagcacatctccgacttcgaccgccaatgccagcgtctgtgcaaggctttcgagcggatactcccggaaaaatcgagctatgaaatctgatatttcggtcgtcattcccctctataacaaagagaaagagatcgcctgcaccctccgttcggtgctggcacaaacctcgcagcctcttgaaatcatcgtcgtggacgacggttcgaccgacggaagcgccgcccgggtcgaggagatcggctcgcccctcatccggctgatccagcaggagaaccggggcgtaagcgccgcccgcaaccgggccatgcaggaagcctgcggagagtacgccgccctgctggacggggacgatacgtgggaaccgggctatctggcagaaatcgaacgtctgatcgctgcctacccgggctgcggagcctacgcaacctctttcaacgtggatgacggacatcacctgacaccgggcgacactccgcaaacggagggtgtcgtggatttcttcaccgaagcgctctcccattacgtgctgatcccctcctcgactacgctccggcggaaaccggctctctcgctgggcggatttcccgaagggatgcgcctgggcgaagatcaatacctttggacgaaactcgcccgcaccagcccggtctgcttctccccggcccggctcgtgcgttactcgaaagctgcttccaaccgttcggcagccatctaccgcccggaacagacgcgattttccttcgaagacctatacgaacccgccgcccgcgattcgagcaacgaatacgtcgcccgcgcggcactgggcaaagccctcgtcgtcagcgccaaaggcggcacggcggaagctgcccgggctgcaaaattcttcgcctacacccggcacgaccggcgtacgctgcgcaaactccgcatcctcaacgcactacctgtccgttggcgcggtccgctgctcgcggcctacaaccgcctggcctgggcgatcgcccggaaagggatgtaacgaaacgccgggacacaaccgccgaggctccggccgacacgacagtcgggcgaagcccccgacaaacaccctccgccagacaaaaaaatcccggcatcgtgaaatgccgggatcgtctttatgtgcgaaacgaaaaactactcctcttccgcctcgtccttcatggcggtatagacgttcaccacgtcgtcgtcctcctccagacgctcgatcagcttctcgaccgcctcacgctcctcgccgtgaagctccttggtatccgtagcgatgcggatcgactcgcccgacacgatctcgtagttctggtcgtcgagccatttctggatcgcaccgaacgactcgtagggcgcctcgaccgtaacggtcgtttcgtcttcgggtgcgaactcgtccacgcccaggtcgatcatcgaaagctccagctcttcgaaatccgtacctgccggcacgtggaacttgaacacgcacttgtgctcgaacaggaaagccacgctgccgctgttacccagcgtaccgccgcaacgactgaagtgcatgcggacattggccaccgtgcggttggtgttgtccgtcgccgtttccaccatgaccgcgatgccgtgcgggccgtatccttcgtagatcacctccttgtagtcggccgaatccttctccgtggcacgcttgatcgcacgttcgatattctccttgggcatgttctccgctttggcgttctgaatcaggatgcgcaggcgggtgttggcggaaggatcgggacccgccgacttgacggctatttcgatctccttgccgatcttggtaaacacccgggccatgtgcccccaacgcttcaacttgcgcgccttgcgatattcaaacgctcttcccatagttttctatattttttcaattattcaacgactctaactcccacacccgaaacgtcttcggggaccggagcgcggcgcaaaattaagaaaaacaattcatattttacaaggaatatccaaaaatgtctaactttgccaaaggttttcgccgcgcgaggaccggccggctctccggatgcgaccgcgtgcctgaacgtccggttccgcgaccggaaaagcggatcgcgtcgccgcctccgggaacgaagcgaaaccgatttcccgcccgcgtcgccgcaaacggaagatgcaaaccggccttacgaccacgacccggagccgtgagccatcccggaaaccgggcgatcgcagtatcgggacgacagccgcttccggcccccgaacaggaaacgacgaaagcctctttccatttccgcgctgcaagggcagacggaatccggacgcgcccaacggcgaaaacgaaacaggatattcaacgaaaacacgacaattttttctatggaaatcaaagcccgcttcgaccatttcaacatcaacgtcaccgacctggaacgcagcctcgcgttctacgaccgggccctcggtctgaaagagatttcacgcaagcaggccgacgacggcagcttcatcctcgcctacctgggcgacggagaaaccgggttccgcctggagctgacctggctgcgggatcacgccgcgacgccctacgaattgggcgagaacgaaagccacctctgcgtccgcgtcgcgggcgactacgaagccgtacgcgcctaccacaaggagctgggatgcgtctgcttcgaaaaccacgaaatgggactctacttcatcaacgatccggacgactactggatcgaagtgctgcccctgaaccattaacacaagacggctcccgggaatcgctccgctccgggagtatccgcaaattcgaaaaacattatggcaacggaaaccatggaacaggccgtgacggaggccgtccggatccttcgtgaaggaggagtgatcctctacccgaccgacacggtctggggcatcggctgcgacgccaccaacgccgaagcggtcgagcggatctaccgcctcaagcgcagcgaaaacaagaaatcgatgctggtgctctgcgccacgcccgatatggtcgtgcggtacgttcacaaggcccccggcatcgccttcgaagtgcaggagctggccaccaagccgctcacgctgatcctgcccggagcttcgggcgtcgccgcgaacctcatccccgaagaggggacgctgggcgtacggattcccgaccatgccttctgccaggcgatgctgcgcaagctggggcgcccgatcgtttcgacttcggcgaacatctcgggcgaagatacgccccgcaacctggccgaaatctcccgcgagatcatcgacggggtggattatgtggtcaatccaaaattcgaaggcaaaccgacgggcaaggcctcgtcgatcctccttttcaacgaagccggagagttcaggatcatccgcgaataaagcaccgacagaactccggcctctttttaccatctaccaggcagagagcctgtccggatcccccgccaaaggcagcgacaggttcttgccctaaaaggtacaccttatggcacgaatcatcaaaactcttattcaaaagcgtgtttcggatatcgacatgttccagcacgtgaacaatgtatcgcagcagatgtatttcgacctgggcaaagcggatttctaccggcaggtcctgcaggacgacgtactctccggaacgagccgcatcatcacggccgcgaccgcgaactccttcaaagagcagatccggatggaggacgacatctacgtcacgactacggtcgccaaagtaggtaacaagagcatcaccctcttccagcagatcatcgggcgcaatgccgccgggagggaaacggtaaagaccgaaagcacctcggtcatggtcgctttcgacttcgaccgtcaggagtcggtgacggtgcctgaacgctggagaagaaacctcgcagattagcttcgcggatcaccaggataatactggcgaaaatcaacaccccggcgatgatgttggtgcggtcgatttgttcctggtgccgcacgagcgcgagaaccgtagcgactacgggctggatatagcggtaaagggccgtgtggatgaaagtgagcttctccgtgccccggtaaagcaggtacatcggcagcaccgtacccagaaccagcacataagccagctccgcctgaccgctcagcggcaggcgcagaaaatccgtatcggcaatgtatttccagaagaagggggcggtaataagcaacccgatgatatagtaccatcccatcaccaccaacgtcccgtaccgctgcaactgcggcttgatgatgaccgtattgaccgcgatcgccaccacggcgacgagcaccagggcgttgcccaggccgctgctgccgggtgccagccgaaaccccttgtcgaacaggaggaaagccgcacctgcgaaacccagcaccacaccgatacggcgtgcccacgtaatgttcttttcccgcagcaggaaatgtcccgtcaggatggtgaacaccggaccgagggtcgagatcgtcgaagcgtcgatcggcgaggtataggaagctccccacaacagcatgaacatccaaccatagacgatcagcacggtcacgatcaagatattgccgaaatcgcgcagcggaatgcggtaggactgtttcgagaaaagggcgaaaggaatgaaaaaaatcgacgccgcaagtacctgaagcataaaaatctgctggaaatcgaggtagttgcgcgtcaaagagacataaaatgaaaaattggcgccgaacaacagattggcgaaaatcagatcgaaattataacgcaacgctcccatagacggaaagcataggacaattttcgcaccaagttccggttttctgcgtatctttgtccctgtcaccaaaaaaggaatcaatcgaatggagcgcggagctctcaaagggcacggagccctgctgctggccaatgtcatctggggactgaactccccgatctgcaagaccgtccttctctcgcccgagaacccggaggggcttaaccatttcgccctgacggtctatcgtctggtcggggcttttctgctcttctggctggcatccgccttcctgccgcgcgaacgggtcgcctggcgcgacctgggcggactgttcgtcgcctcgctcttcggcatccagctcgaccagattcttttcctctggggactctccctcacctcgccgatcaatgtttcgatcatcgccaccacggtacccatcctcacgatgatcctggcgatgttctttctgcgcgaaccgatcaccccgctcaagacgggcggcgtgctactcggcgcggcgggagccgtgctgctgatcctcatcagcagccgcggcgaaagcggcggcggatcgatcgcgggcgacatcatcaccctcgtcagttcggtctgctacgccatctacctgacggcctgccgcaaggtgatcctcaaatactcgcctgtgaccacgatgaagtggatgttcttcttcgcagcgatcgtagtggtcgtactttaccaccggcccgccctcgaagtggacttcccggccgttcccgcacgggtctggggcggagccgccttcgccatcgtactctcgacgttcctggcctatctgatggtgccgatcgcccagcactacctgcgtccgacggttatcagcatgtacaattacgtgcaacccgtcgcctcggtgcttttcacggtcgtgctcgggctcgacgttttcggattcacgaaagccgccgcagcgggctgcatcttcctgggcgtatggctggtaacgatgtccaaatcacgaaaagacctcgaagcggaacaagccgccaaaatgacggataagaaataaatcggccgaccgccccaggcgaccggtcgttccgaaaaacatgcagcgcaaggcgaatccctgcgctgcatttcatatacggtcatcccgcctctccgcacccgcacgacggcatacgggatcgggatcacccgccttacgataaaaatcaaaaggaaacaagctccggaaaacgaaccgcacgaggaagggaagggtcactcactgttttttccgaagtccccgttcttccgccagccgttccatcaaggcgtacgccgcctcataatcgttgggaatctccccctccagaatggcctccttgatgatctccttgatctcgccgatcacgcgggagggcggaactccgtaggtttccatgatgatctcgcccgtgatcggaggctggaaattgcggatacggtcccgctcctccaggtccttcatcttgcggcgcaccaactcgaaattctgcaggtagcgtttcactttggcgtcgatgccggatgtaatatccgcctcgcagagggtcatcagcttctccacatcgtccccggcctcgaacaacagccgccgcaccgcagaatcggtcaccatatcttccgaaaggataatgggacgcagatgcagaaaaaccatcttccgcacgaacttcatatgctcgttcagcggcagcttcaattgccggaaaatccccggcaccatcttcgaaccgaccacttcgtgcgaatggaacgtccaacccacctgaggatcgtaagccttcgtcagcggcttgccgatgtcgtgcaggatcgccgcccaacgcagccagagatcgtcgctcacggccgccacgttgtcgaggaccttgagcgtatggtagaaattgtccttatgggcgtgttgtccccgccgttcgatgcctttcagacgctgcatctcggggaaaatcagctccagcagccccgtccgctccagcaggtcgaatcctacggacggaacgggcgagagaacgatcttattgagttctacggcgatgcgctcccgcgaaacgatgccgatacgctccctgttgcggacgatcgcctcgaaagtttcggggaagagccggaaattcagttgcgaagcgaagcgcacggcccgcatcatccgcagcggatcgtccgaaaaggtgacatccgggtcgcacggcgtgcggatgattccctcgtgcagatcccgcatcccgtcgaaaggatcgaccaggcggccgaaatcctcctccgcgagcgaccaggccatcgcattgatggtaaagtcgcggcgccgctggtcgtcttcgagcgtccccgcctcgacctgcggcttgcgcgaatcgcgcacgtaagactccttgcgggctcccacgaactcgacttcgacacccctggttcggagcgccgccgtgccgaaagtcttatagacggacaccttggtccgcagttcccggcccagctcctcggccagcccgataccgctgcccacgaccacgacgtcgatgtcggtagaaggccgcccgaggtagaaatcgcggacataccctccgacgacgaaggccggaacgtcctgccgggcggcaatcgcggagatctgccggaaaaccggcagggacagaggagctgtggaatcgttttttttcacggaataaaatcagaattttaacaacattacgacctaccctccgcatccgtttcgatacggaacggacggaactgccccgcgacggcccgtcgaagagcgagccatccgccgggaaagcggcttcggagcgaatgccgggcgaattttcagaacgccagttcacggcggtaaagccgcacggtattttcgagcccgtaatagagagcgtcgcagatcagcgcgtgcccgatcgaaacctcgtccgtccagggaatccgctcgacgaaatagcacagattctccagattgaggtcgtggcccgcattgagccccagaccgcaacggcgagcctcctcagctgcccggacataaggctcgatcgcccgttcgcgcccggcggcgaaatcccgggcataggcctcggtgtacagctccacccggtcggctccgcactccttcgcccccgcaaccatctcggcgacgggatcgacgaaaatcgaaacccggattcccctggcctgaaattcagcggtcacctcccgcagaaaatcgcggtacttcaccgtattccatccggcattggaggtgatggcgttctcggcatcgggcacgagcgtcacttgcgccggacgcacttcgagcaccagttcgcggaacgaagggatcggattaccctcgatattgaactcggtcgtcagcactttcttcaggtcgcgcacgtccgaataacggatatggcgggcgtcgggacggggatgcaccgtaatcccctgcgctccgaagcgctcgcagtccagtgccgcacgtaccacgtcgggaagattgccgccgcgcgaattgcgcaccacggcgatcttattgatgttcacactcagttttgtcataaaaaactctatttacccaaaaacgacaggcaatccgtcaaactttacccgcaaacccgcacgattgctctcacctttcactatctttgcggaggtaaagttaattatttttccagacacgacggatgaaaatcatacttttttcccggcagggcgtcgtccacacggccggcgacctgcatcagatgttcgacgcgatcgcccgtttcgggttcgattacgcggtcaatgaggagttcgctccccagatcgaacggctcaccggcatatccatcgatgcggcccaccgttacgggcggccgatgggtccccagcctgcggagtcggtgctggtatgttacggcggcgacggtacgcttttggatggcattcaccggctgggaggggccgaaatccccgtcataggcatcaactcgggacatctgggttttctgacgagcgtaccccgcaacggctgcatcggcgatgtcttcgagctgatcgccgccggcaaactcgaatgtcagccccgatcgatgctcgaggtcacgggcgacttcggcgacggcatctcgacccgctatgcggtcaatgaagtggtcatccagcgccaaggcgcgggcatgatctcggtcgaaacgtacgtgaacgaccaaatggtcgccacctaccacggcgacggcctgatcgtcagcacgccgaccggctcgacggcctattcgctcagcgtgggcggtccggtcgtcgccccccaatgcgcctgcctggtgctctcgcccgtcgcgccccacaacctgacgatgcgcccggtcgtgattccttcgtcgagcgacgtgcggctcaaggtacacgcccggcacgccgaaatatcgatcgccaccgacaacgaaacctgtccgattcccgaaggagccgaattcagggtccgactggcttccagacgcttttttctggcggtcccgcacaatatatcgttttacgacacgttacgcaagaaaatgatgtggggagtggatatccgaagctgacgaaaaatccctgtttgccggaaattctttcgctttcggattttattccctatatttgcatgctatgagcgagcaaaaacgcatacctcgacacgtcgccattatcatggacggcaacggacgctgggccgcgcaacacgggctggagcgtttcgaaggtcatatccggggtgtggagtccgtgcgccgggcaatccaggccgcgacccgtcacggggttcgctacctgacgctttatgctttctcgaccgaaaactggggacgccccgccgcagaggtcgatgccctgatggagctcttctgcaagagcgtaatcaacgaaacgcccgaactggccgctcagggagtgcgcgtgcggatcatcggcgacaaaagccgtttccccgaaaaagtaaaacaccacctggatcagatcgaaaaccgaacggctaccgggaaacgccttacgctgcaactggccctcaactactcttcccgcagcgaaatcgtccatgcgatgcagggtctggcacgccgtgccgcagccggcatcttctcttcggaagagatttccgagcaaacggtttccgaagcgctctatacggcgggctgtcccgaccccgacctgctgatacgcaccagcggcgaacaacggctcagcaatttcctgctgtggcaggctgcctacgccgaactctttttcacccccgtattatggcccgactttaccgaagaggatttcgcgcaggcactcgacgaatatgcccggcgcgaaaggcgtttcggactggtaaaaaataatgaacgtattcggtaagcgagtgcatcacgagtttactcgctacactgaacggagagaatgaagaaagaaactctagagagaagttagacgacacacgatgaatcatccaggcaaagtatttctgacactgacggccgccctgctgctgctctgtccccagatattcgcgcaggagccctccggcgaggcggctccgcccccggccgaacagacggatcaggacgaggatacgaaccagcttttacagcaattcgaaaaagccccgacactcgaaggcggtacccagaaactttaccacatccgcaacgtcaatattcacggggcgcaatacattgacaacagcattctgcgagcttcgtcgggtcttatcccgggcgattcgatatacctgcccagcaacttcatctcgacagccatcacccgcctgtggaaccagcgcctcttttcggacatccgcgtcggtgcgaccatcgaaggcgacagcctcgacctggaagttttcctgaaggaacgtccccgcgtcaattactggcgtttcgagggcatctccaaaagcaaccagaaagacctgctcgaaaagctcaaactcaagcgcggcaccgagctttcggactacgtgatcgacaagaactcgaagctcattcacaaatactacgcagacaaaggtttccgcaacgccgaagtatcggtccgcatcgacaacgactcgatactgaagcaggccgtaaacgtgaccttcatcgtcgatcgcaaacgtaaaatcaaaatcggagagatcaatttcacgggcaacgaagaattttccgacaaacgtctgcgccgcaccttcaagaaaacccaccagaaaagcctcaacttcttccggggggcgaaattcaacgaagaagatttcgaaaacgacaaggagctgctgctcgacttttacaattcgaaaggtttccgcaacgccaacatcgtcgccgattcgatctacgcgatcaacgacaagcgtatgggtatcacgctggacatttcggaaggcaacaagtactacatccgcaatgtttcctggatcggcaactcggtctatgaaaccgacgaactggctcggatgttcggtgtcgaaaaaggctcgatttacgacaaaaaatcgatgtacaagcgcctgggcatcggcgcctactacaatccggacgaaccgtccatcaccaatctctacaaagatcagggctacctcacctcgcagatcgacccggccgaaatcatcatcggcaaagactcgatcgacctggaggtccgcgtattcgaaggcaaacaattcaccatcaacaatgtcggcatttcgggcaatatgcggctcgacgacgaggtgatccgccgtgaactctacacgcggccgggcgaactctacaaccagtcgctgttgttccagaccatccgcaccctgggttcgatgggacatttcacggccgaagcgatcgctccggacattcagcccgtcgtcaattcggacgaattggtcgatatcaactggccgctcgaggagatcgccagcgaccagttccagatcgccggcggttggggcggcggtacgttcgtgggttcggtgggtgtcacactgaacaacctctcgatcaaaaacttcttcaagaaaggcgcctggagaccctacccgatgggacagaaccagcggctgtcgatcagcgcccaaaccaacggtacttactacaaagccttcgcaatcagcttcaccgatccctggatgggcgggcgaaaaccgaactccttcacgatttcggctcactattccgatgagaacaacgcctattacgcctggcagaaaggtacccgttatttccgcaccgccggtgtcgcggcgggactcggcaagcgtctggactggcccgacccgtacttcacgttctatgcggaagccagctacgagcgctacatgctgaaggactggaacaccttcgtactcaagaacggtgcggcaaacctgctgtcgatccgcctggtattgggacgaaattcggtggatcagccgatctatccccgcaggggttccgatttcagcgtttcggtgcagctcactcctccctattcgctgtgggacggcaaggattacaaaagcacggctttaagcgaacaggaacgctacaactggatcgaattccacaagtggatgctcaaaggccaatggttcactccgctgacccgcaacggcaacctggtgctgatggcccgcgcagaaatgggatacctgggacattacaataaaaacaaggtatcgcccttcgaacggttcgaagtcggcggcgacggcatgacgggctataatatgtacggtatcgacattatctccatgcgcggttacgacgacggagcgctcgatcccgtaggcagcaactattcgtgtgcctacaacaaatacacgatggagctccgctatccgctcctgctcaagggacagaccaacatctacgtactgggattcctggaaggaggcaacggattcacctcgtggaaggagttctccccgttcaagatcaaacggtcggcgggtatcggcgtgcgcctcttcctgccggtcgtaggcatggtgggagtcgattggggctggggcttcgacccggccgcaggacagaccaagcgcagcggcagccacatccatttcacgatgggtatgcagttctaaaccggcggaagttggcaataaatttgaagaaacagggttatacttataaaagataactaaaaaataaacggtatgaaacggatccttttgctcgtactcgccttcacggcagccataggctcgctttcggcacagaactacatcgtggtaaacagcgaaaaagtattcaagtcgatcgacgaatataacaaagcactcgacacgctcgaccaactggccaaaagctatcagcagcaggtcgatctcaaattcgaagaggtcgaagccctctacaacaactataaggcgcaggaaatgtccctttcggcttcgtcacgacaggcccggcaaaacctgattctcacccgggaagaggaggccagcaaattccaggaggagatcttcggccaggacggtacccttatgaaaaaacggatcgagctgatccagccgatccagaaacgggtattcgacgccattgcgaactatgccgcacaaaacgggtatgagctggttctcgatgcggcttcgaaccccacgctgctttacaattcagaaaaaatcgaccacactcaggccctcatcgaatttatgaaaaagtaagaaatatcgaatcaaatcaataaatccgtatgaaaaaactcattaaattaaccctcgtggttgccttggtactgggaagcagttccctgttcgcacagaagctgggccgtatcaatctcgaagagatcattacccttatgccggaatacaaggagatgatgaccaacatggaggcgtacagcaaagatctgcgcgacaacctggaaacgattcaggtcgagctgaacaccaagtacaacgatttccagaaaaacaaagcgacctactcggaggtaacccgccaactgaaggagaaagaattgaccgacctgcaaaaccgtctgcaagagttctaccagagcgcacaggaagacttgcagaaaaaggagaaggagctgaccgacccgatcgtcgccaaggctcaggaggccgtcaagaaggtggcgcaaaagggagcttacgtcgccgtattcaatacgaccatcccctcgatggtctattacgacgaagcagccatgaccgatttgagcaccgaagtcaaggccgagctagggattcaataaacggcaacgcatcgacaacaaaaagcgtccgcttcggatttcgaagcggacgctttatttcttccaaaagtcctttccgagctgcggaaatcaaagttcaacatatccttcccctgccgacacgaactccgtgcagacgaatcatcctcgcccgacagcggctccatacacagccccggccgccgcagtgaaaaatccggtacaccgcccgctccggcccatattcccatatcggcatcagaacggataacctactccgaaattaagcgccgtattcttccacttgaaattgtggatccaccgttgtccggcaggtgcattggggttgtggatctgtatgccccagtccagacgcagtacggcaaatttgatgtccaggcgcagaccgataccggcatcgaagcccagttgcctgtagaaactgtcgaaatggaaaaccgcagcgggcgaaggcgcggaatgccggtcggcaaaccagatattgcccacatcgacgaacgtcgctccgtgaaacatcccccaaatcgggaagcgcaattcgagattggcctccagcttcatatcgcccagttgtgtagggaaaaccgcatcttccggctccggaacagcccccggccccaacatacggggtgcccaaccgcgcatgctgttggcaccgcccgcataaaacagacggtcgaagggaatcgaagtcgaattgccgtacgccataccgtaaccgccgtaaagccgtcccacgagagccgtcacctcaccgagcatgatcttgcggctcacactcaaatcggcccggaaatattgcgaatattgaagaccgaaaacctcgtaatagtccttcccggccgccggacgcgagaagaggtgcatcaggccgtcgagcaggttgcccgccatctcgtaattgaagcggagcagcgtcgcgtttccgcccagatgcttgcgctgattgttatagacataactgaacgaaaggccgctgatgaactgcgactcgtaacttcgcttgagatattcgttctggagatgatccaggaaatcctccctattgacataccccatatcgatcacgttgatatcgatcggacgcagcgaatagctcgaatacttcaaatcgctccacgaatatccccaagccacgctggaaagggtacgccgataataagggcgatcctggaaattgatgccgaattcgagccgggtccggggcatctggatcgactgccaccgctgggttcggaaaggcagcaggaaacggggaaactgcaaacccatattgactccgaattcgatggcgttgcgcttgcgggcactcggagttttcatatactcgtaccctaccgagaacgaaacgtcgaaagactccgctccccggaaaatattgcggttctgataccccaccgtcgcccgcaatccgtagaaactcgacgtcgtacttccttccagctctatcttatacccctgcttcaaggccggaatgcactggatgtcgcactggagatagccctcgcgggtctgatgtaccgaatcggccggctccttgccttcgcccacgaaagtcacgtagttatcctttgccacactgtcggcctgctcgttgaaaatgacgttggcgcttttgaaatagcccatcgacataatctggttgtacgtctgatcgacccggttaatgttatagacgtagttcggatagatcggcacgatctgtcgcagcaccgaaggacgtatgttgggacgcttgttgtccttgtggtacaccacgttcaacccccggtagtagatcgtgtcgagtcccttgcggtagtcgggagcaatagccgccgtaggatcgtaattgggaaaaatattgatctggtcgatacggtaaaccgtattgttgcgcagaatcggataaccctgctcgttataaccggccagatgctgcttgacgatcatcttcaggtccaccagatgattgccgccgagcgtgtcggcttcatactcgatgttattgaccgtaaaattgtaatagccgcgctgtttgaggtaggtggtgatgcgctgccgctcctggtcaaggacctccatgtcgaacacctcgcccgtacggagcagcgaatgtaccgtatcgggcaggatgatctgctcgaggaaccgatcgcggaaatcgtacgaaaggcggttgatgcggtaaggctcgcgctgtacggtgcggtaggtgatgaaagcccgctttttccgcgacgtggtatcgacttcgtaagtcgcctgcgaagagaagaacccccgatagtccatgtaaaccttcaggttgcggaccgactgctccgtgaggctcatatccagcagcacgggcgcttcgccgatacgccgtttgaaccggttccaccaattatccttttcgggatcggcctgctcataaacccagacgtaaaaattgagtcccaggaaccgtttattcggattctgacggatgaatttccgcaggtcggaagccggaatacgctcttttttaggcgtttccttatcggcttctacggtcaccttctgcaccagataactttcctcgggaagtttgcgcgtgacactgcacgacacccccgcgagcaccgccagcaaaaagacgaatatgaccggcaaccgtttcaagacttccgttaattgttgaagaaaccctgttttttcagcagcgcgaaatagttgcgcgaaatagccaggttatcttcggcacgatacctgttgcgcgtgaaaatctgtgccagattcggcaggccgttctcctcgagcagccgccgggtctcttccgacgtctccttctcggcccagagttcgtcgatctccgacgaggtgtaatgatggtatttctcgcaatgcacgaccgcatcgagcggcaggcggtcggtcagttcgggcgactcgtcgggatgccccaccacgatcgtcgtcacgggaatcacccctttgggaagatcgaggatgcgggcgatctcctcggccgtatagatggtcgtaccgaggtaacagattcccaacccgtgcgcttcggcctcgacacacaggttctgcgccgccagcagcgcatcggtcaccccgttgagaaaccaggcgaaattatcgtagcacggctcggcatcgcgctgttcgcaccacatcgaaaaacggtggacatcggcacaaaccgtaatcacgcagggagcctgcgtaaccatcggctgattgaaatgacacggggccaatgcctcgcgcaattcccggctctgagtaacgatcagactgtaaagctgcatattgccgcacgtcgaggcacgcgaggcggcttcgagcatgtcttgcagcacctccggcgcaataggctcagagcggaattttcggatcgaacggtgttttgcaagcaatgttttcatacggattataagttacgtaacaaattcacgcaaaagtagtaaaacttttagaattttattatttttgtccgcgttaaagctggttggaacctattttgcagcgccccggaaaaaccctcttccgtcccggacatacacgcgttttcaggatgcaagagaagtgccgaacggctccgacctccgaaccggaatagcgacaaagccgatatttcagaacagatgcaaatgcgattcgcaaaatacgaaggtgccggcaacgacttcatcctgctcgacctgcggaacggcggagcgactccccaaagcgcggagatcgcccgtctgtgcgaccgccatttcggcatcggagccgacggtctgatgacgctcgccgcttccgccgtatccggctgcgactgttcgatgcgctactacaacgccgacggctcgccgggcgagatgtgcggcaacggaggccgctgcttcgccctgtttgcccatcacctgggcatcggcggcgacatcaagcggttcgactcgacggacggcatccacgaagccaggatgcttcgtatcgacgggctgcgaagcaccgtagagctgggaatgatcgacgtcgaacggatcgaccggggcgacggatactggttcctcgatacgggcgttccccactacgtcgaattcacggacgacctcgaagccgtggacgtcatcggacgcggacgccggatacgctacgacaaacgcttcgccaaaggcaccaacgtcaatttcgtcaaggtagtcggtcccgggcatatcgccgtccgcacctacgaacgcggcgtggaggacgaaaccctcgcctgcggcacgggatcgaccgctgcggcgctggtcacccacctcgcggcccagccttccgtcacagcgttccgcatcgacgtacgcggcggacggctcggcatcgccttcgacgagccgaaacccggcatctacacccgcatccgcctttcgggagaggcccgcaaagtattcgaaggcagctacgataccgccaactttcaatcctaaatctattttttcttctccgatccatgaaaacgaacaagggattccgcgacgaaaaccatgcggacgaacttcgtaaggccaaacggctcgagccgatccacaaaagcggcaaggaacgccacaccatctaccgcgaactcgacgacgaggaagacgatgcgcccgcacgccccaagcgggaatcggcgttcgactatttcgacgacgaggaaaactgaaaatccacccgacaatggttgaaaaattcattacggcaggcgacacgcccgtccatgtgtgcgactccgaaaaaggagaccggtgcgcggtcctgttgcacggttatctggagtcgatgctcgtctgggacgatttcgtcccctatctttacaaacaggtacgcgtgattacgctcgacctgctggggcacgggatctcggtggtcaaagggcctgtacacacgatggaatacctggccgatgtggtgaaggatacgctcgatgcgctcggtatcgcccgctgtaccctggtgggacattcgatgggcggttacgtcgccctggctttctgcgagaaataccccgaacggctcgacggcgtggtgctgctcagttcgacgccggacgccgatacggacgaaaagaaagaaaaccgcctgcgggaaatcaaattggtcgaagcaggcaaaaaggacgcgctggcccgcgtagctcccgaagcgggcttcgctcccgaaaaccggccgcgaatgcgcgacgagatcgaagatctggtcgaacaggtattcgtcaccgaagacgaagggatcgcagccctgctgcgcggtatgatcgagcggcccgaccgcaacgaaatgctccgccgctctgcggtgcggcagctcttcatcttcggtaagcacgacggctatattcccctcgaaaaagccgaagcactggcggcggcccatcctcaggctcgcatcgcctggctcgaacattcgggacacatgggattcctcgaagaacccgaaatcacggctcgggccctgttggattttatgggaacggaaaacgaaccggaatcccgatagcgaaagtttcctaaaagggaaactttttcatttttatttctccagacgcagatgcagaatcggaaacggccggtcggcatcgtccgtttcgctacgcccgacaaccgcaaaccccatacgcaggtaaaaacccaccgcctgcggattctgttcattgacatcgaccgaatcagctccctggcgggcgacggcccactccaccaacttgcgtccgcagcctctgccccggtattcgggccgaacgaacaacatggcgatatgacttccgttcagaccgatgaacgccacgatacgccccgcatcccgcaggcagcgaagttcgaccgccggcaggtagcggacaggcaacagagaacgcaattcccgaatatccgcctcggagagaaaatcatgggtagcccgcacggaagcctcccacacttcggccagctcttcgaaatcgtccggtccgacctttacaacgctcatctgtcaatgattaaaatatatccgacgatcgcttattcgcggtactggccgcgtttatgattccgaactgttcccaaatcccttcctccgaaagaatctgcattgttacgcccggcatataagcgaattcattatcaaccgataaaaaagacgatccccgccagatgcgacaacagcgccaggtcgataaacagatgccagaccaggtggtggtagcggaatcccttcttcgcataaacgatcgctccggccgtatagaggaccccgcccagcaggatcagcaacagcagaggcagcgaagcgttccgaatcagccgaggcaggaaaaagatcgccgtccagcccatcaccagataaatcgtcaggctcaaagccgggatggaacgccgggccagcgtcttatacagaatacccagcagaacggccgtccactgcaaaacggtgacgaagacaccctgccagccgccgatcacgagcagcgctacgggggtataggttccggcgatggcgacgaagatgaagatatggtcgagcttgtggaaaacggccttgtgcttcgaatccgggcgcatcgaatggtagagcgtcgaagcgagcaacatcagaaagatcgaaatgacgcagacgcttaccgacaccgacgccagcacgggccgggcatcgtgcagataggtccacaccgcagcgaaaggcagcagacaaagggtcagcggcagcatcacggcatgcgaaaccgtgttggccacctcctcgccgtaggtgggtacgtagggcaaacggactttttcctcttttttcatagacgacgtataattctgttctacaaagatacgttttttatacaactgcatcggtttttgcacaagattattccgtgaaatccccgacggcgctttgcgatgccgaagattttcgctacttttgaaaaacagtaaaactttccggaaaatggatttgacccgttatgacaagctgcgcagcgcgatccgccgaacgctctcgcccgacgaggcggccgcagccgaccgcgccctggaatatgctgccgaacataccgcttcgcaggtacgacacgacggctcgccgatgctggaccacgccgccgaagtagcgcggatcgggctggaggagatcgggctgggaggcgactcggtcgtggccgccattctccacgacgtagtccgcacagccagtcggcaggacgaagagacattcctgcggctgacggacgagatccgggaccgcttcggcaaggaggtgctcggcatgaccgtaagtctgagccacatctccgatattcgcctgaaagcctcccgggagcaggcggaaaatttccgcgagctgatcgtctcctattcggaagatccgcgcgtgatcctgatcaagctggccgaccggctcgaggtgatgcgccgcctcgaaattttcccccgcgaaaagtggcgcaagaagagctgggagagcctcaacctctacgcccaaatcgcccacaaactgggtctatacaacatcaagagcgaactcgaagacatcgccctgcgctatctcgaaccccaggactaccagcatatcgccgacaaactggccgagaccgaaagcgaacgccgggccttcatcgcccgcgtcctcgaacccatcacgcagcggctcgaccaggcggggctgcgctatcacgtcaagagccgcaccaagtcgatcttctcgatctggaacaagatgcgcaagcagcacgtcccgttcgagggggtatatgacatcttcgccatccgtatcatcctggactgtccgctcgaagaggagaagcagcaatgctggacggtctattcgatcgtcacggatttctacacgcccaatcccgagcggatgcgcgactggatctccatccccaaatccaacggctacgaatcgctccacaccaccgtcgccaccaaagagggacggtgggtcgaaatccagatccgcaccgagcggatggacgccgtggcggagcggggcatcgcggcccactggcgctacaaaggcgtaaacgcgggatcggacgggagcgaaatgtggatgaaacaactccgggagctaatggaagacaagacccgtccgctggcccagaacttcgacgccaagccctcctcgggcgaaattttcgtcttcacccccggcggcgacctgcgcaagctgcccgaaggagccacggtgctggatttcgccttcgacatccacacctcgctggggctcacctgctcgggcggcaaggtcaataaccgtccggcggcgatccgcgacgtactccacaacggagacatcgtcgaagtgctgacgcagaagaatcagaagcccaaagccgactggctggggttcgtcaccacgtcgaaggcccgcacccggatcaaggcctcgctgcgcgaggagcacaccaagaacgcccgtctgggacgggaagaattggaacgcaaactcaagaactggaaactgcccctgaccgtcgatgaaggggtcggcatcctctgcaagcacttcaaactccgcacgggaacggaactttacgcctcgatcggcaccgaaaagatcgacctcatgcagatcaaggagctgcttcaggcccatctgtcgggcgaagcggaggaagagcgccgggccgcagcagcagccatcgagtccgaaaaacgacgcaaagccgaaaaagtttcgacccagagcagcggcgacgcactcatcatcgacgaaaagatcggacagctcgactacaaactggccaaatgctgcaatccgatccacggcgacgaaatcttcggcttcatcaccgtaggtgccggcatcacgatccaccgtacggactgccccaacgcacagcgtctccgcagaaactacccctaccgggtactcgaagcccgctggcgcgacgaagcgcagggcgcgttccgggtgtcgatccgcgtggtggccagcgacacgacggggatgatcaaccacatcgccgaagtaatcaaccgcgacctgaagttgagcatccgctcgatgaacctgtcgccgggcggcggcctgctctcgggcgtgatccacgtcgaagtgcccggtacgggcatggtcgatatgctgatccactcgatcctgcggatcaaaggcgtgcagaaagcctaccgcgtcaataactgaaaacgccccgaaaagagaaagccgcctttatcaggcggcttcttcgtcgcatccgacgggtcggcaacccgccagcgcatcataaaaagcagtaaaaaaagatacaaaacagcccgcagaaaaccaccctcgacctgcaagtgtatcctgtcataaaaaagagtgtgttgaaatgaaaatttcaggcacgatcctaaagggtgtcggaatggatgcaaggcaaggcattgagggtaagggtgacagtcttttactatggcaaatgacttaacccgtatcccgataataactaccgttgtgtgtcattcggacacaccgccatacacctgttcgggtcccatgtccggaaatttacaacggacctccgccgatcggacaatccgcactcccgcccggaaatccgagccgagccgcagaaaatccagacaacaggtcaaaaattcgcacgaggaacccggaaccaagctgcacgggcaaccgcttccctaccggtcccgctcaccgacatagacacagaggttggccaatgcgtcgcggtattcggaaggttcgtattcggagagcacggacatcgcccgcgtgaggtattcctgcatgacgcgggccgccttttccataccgccctcgttctcgacgatgtgctgcaaatattcgaccgactcatcctcctcgtggcaacgggccagccgggccagcaactccctgcggcgctcctcgccgacggactcgagcaccgtgagcagcggcagggtcaccttgtgttcgcgcaagtcgttgttggagggcttgcccgtacgggccgtgcgggtatagtccagaatgtcgtcctgaatctggaacgccatgcctatcgactcgccgaacttgcgcatgagcgcctgtttttcacgggacgcaccgacggccagcgctccggccgaagcgctcaccccgatcaggcaggcggttttcttgtagatgatatccaggtacgacgcccgcgtcatctcctgccggttcgccttgtcgttttgcagaatctctccctcgcagagcgtggcgatggcaccgcaaacgtgagtcaccaggtcgaactggccgctcttgaggccgaggtccatgtttttggccaggatgtaatctccgactacgaccgcattgcgcgactgccagcgggcattgaccgaagcccggccccggcgcatgtccgattcgtcgatcacatcgtcgtggatgagcgaggccacgtggatcatctcgaccaacgtggctgcgagcagtgcgcgcagaccgccgctgcgctgccccgccggagcgttgagcgccgcagacagcagcaccgtcatcggacgaatccccttgccccgcgccgagagcgcataatcgagcatctcggagagcaacgtgccgtccgccgtgaatttttgccggatgaactgctcgaaggcctccagatcaccctcgaccggcttgcggatcatatcgagtgttaccataaccgaacttttgtttacgtcgaaaaaaggttagccgaatacagagcgattgtctccccgccggaatacaaccgccccgagcctgggatcaatccgtgcaaaggtagtgatttttcgctgagtcggggaggaaactcaatgttttttcgtacctttggcaatcgacaaaaacattccagatgacccgcttcaaagagattctcccgaaagtgctgccgacgggcgcggccctgctgctcttcttcatcgtcagcgccctctatttcgccccccagtttcgcggcgaagtgctgccacagcacgacgtgcagcaatacgaaggcatggccaaggagatctgggacaaccgcgcccaaacgggcgaagatccccagtgggcggggcggatgttcggcggcatgcccgcctacctgatcaatgtagcctacccggcacagctagtcaaaaacacggcaggacagatcgttaaaattataaatactcccgcagccttcgtcttcttcgccatggtttccatgtggctgatgctcccgatcgtcggggtgaatccctgggtcggcatcattccgtcgctcatgtacggcctttcgacctactttttcctcatcatcggcgcgggtcacgtgaccaaaatgtgggcactggtatatgcccccctgatgatgggcggcgcatggcttacgctgcggggtaacatgtggctcggcggagcgcttacggccctcttcgcctcgctcgaaatcggcgccaaccatccgcagatcacctactatttcctgctggccatggccgcgctgtggatcagcgaaggaatcgtcgccttccgaaaaaagcacctgccttcgttcgtccgccgcacggcggtactgctggccgcaggcattctggccgtcggctcgaacttcgctcctctgtggtacacgatgcaccactcgaaacagaccatccgcggcggttcggaactcgccgccggcgaggaaacctcccaggaagggttggcactcgattacgctacggcctggagctacggacgcgccgaaagctggaacctgttgattcccgacttcatgggcggcgattcgggtcgggcgttcacacgcgacggcaaggtagccgaggccttgaaaccgtacgggctggagggtatcgcggagcaactgcccgcctactgggggcagcagccctacactgccggaccgacctacctgggcgccgccgccctgttcctggctctgctgggactcctgctggcatcgggacgcaacaagtggtggatcgcagccgtcagtctgctgacgcttttgctggcctggggacataatttcatgggattcaccgaattcgccttcaaatacctgcccggctacaacaagttccgcaccgtatcgatggccctcgtggtggtcgaatggacggttcccctgctcgcggcgttggctctgatgcccctctggcggggagaggtgccgcgtcgaaaactcctgcgggccctcgcctgggccggaggcatcacgggcggtttctgcctgctcttcgccgtggccggcagcgcgatcttcgacttcggccggacggaagccgccgatttcatgagccgccaatactaccagatgttccaagccgcaggtatgcaggaagccatcgcacagggcgctcccgaagagttgggagaggtgacggccgacgccatggccgccgaccgggccgcgatcatgcgctccgatgcctggcgctcgctcgtaatgatcgccctcgcggcgggcagcgtgctgctcttcgccctgggacggatcagacggggctggctcatagcgctgctcggcgtgatcgttctgatcgacctggtgccggtcaacctgcgctacctgcctcaaagccgcttcgtcgccgcacggcgccagcagatacagcccacggaagccgaccgcgcgatcctgcgcgacccggaacccggattccgggtgctgaacctcacggtcagccccttcaacgatgctacgacctcctacttccatcgctcggtgggcggctaccacggcgccaaactggcccgctaccaggacttgatcgagcgttatctcacgtcgatggacgagggcgtactcgacatgctcaacacgcgttacctcatccgcttcgacccgacgggacagcccgtcgccgaattgcgggccacagccaacggcccggcctggttcgtccaggaggtcgtcgatgcggacactccgcagaaagaaatcgacgcactggggcgcatcgacaccaaaacggcggctgtcatcaacacccgtgagttcgatatccgccccctgatcggcggcgaaggggaaatccgtctggaggagtaccggcccaattatctccggtacgaatacacggccactgcgcccggtacggcgatcttctcggagatctactacaaggacggctggacagcctatatcgacggcatcgaaactccctatttccgagccgactacctgctgcggggaatggagctcccggccggtacgcacacggtcgaatggcggttccgcgcccccggctggaacgtcgccgaaggcgtgacgctcgcctcgtcgctcgcgattctcgcaggcatcattgcaaccgttatactcgttttacgccatgaaagacgacaaaagactcaagcgtaaggtacgcaattcctacatcgtttcgaacatcagcatcgccctggtgctcttcctgctgggatcggtgggatacctcatgacggccgccatgcaggtggcccgcacgttgcaggagagcgtcaccgtcaccgtcgagcttcgcaacggagcggacgaaaaacaaaaagaatcgctccgcaaacggttcgaagccaacgagctggtgagccatgtggaatacagctccaaagacgataaactgaacgacaccgatttccggcagatgttcgaacaggagttcgaggcgatcctcgaagagaatccgctgctcgactcgttcgaattgaccctgtcagccgattcggcggacccggacaagctcgaaaccttcatcgcccaaattgccgaactcgacggcgtggaccgggtttcctatccggcacagaccgtcgagcggctgcatgccacgatcgcgaagatccggctggtgctgctactcttcggcggagccctgctcgtcatctcgctcatcctgctgaacaacacgatccggctggcgatcttctcgaaacgctacctgattaacacgatgaagctcgtaggggcaaccaaatggttcatcatgcgaccgttcctgggcagcagcatcacacaaggcattctgtcgggaatcatcgcatcggcactcttcctgacggccgtttacggactgaacgaggcggttccggaactgatgtcgctggccgaaaccatgaaaatcggaatcatcgtgggcggcatggtgttgggcggcatcctgatctcgctctgcttcacgttcttcgccgtcaacaagttcgtcaacatgaaatccaacaagatctatctctactaaaaatccccgtaccatgaaaaaattcaaggagatcaacgataaaaacgatccgaagatgccgctctcgctcaaaaattacatcctgttgctcgccggactgatcgtcatcattctgggcttcgtcctgatggccggcggcggcagcgactcgcccgacgagttcaactacgccatgttttcctggcgccgcatcacgctcgccccgatcctggtgatcggcggcttcatcttcgaaatttacgccattctcaaacgattctgaatccggacttctccgaccgccggaagccgggttgcaacccgcgcttccccgacaccgaaatatccccgagaactgtaaaatggaaaccattcaagctatcatcctgggcatcgtccagggtctgaccgaattcctgcccgtatcgagcagcggccatctgcaactggccaaagaactgctgggcgtcgatcccgaagtgggaggactcaccttcgatctcacgctgcacgccgcgacggtcctgagcacgatcgtcgtgctctggagcgaaatcaaacgcttggtcgtgggactcttctccaaacgattcaacgcggaacaggcctacgtgctgaagatcatcctttcgatgatcccggtagtcatcgtgggcttcacgctggaaccttttctccagtcgctcgtcgaagacctgccgaatcacggcatcctgctgctggtcggaaccatgctgctggtcacggccgtactgctgaccttcgcctattacgccaaaccccgccacaaggcgaccatctcctaccgcgacgccttcatcatcggtctggcgcaggcagtcgccacactgccgggtctgtcgcgctcgggcacgacgatcgccacgggactgatcctgggcaaccgcaaggagagcgtggcccaattctccttcctgatggtgctggcaccgatcctgggcaaaatggttctcgatctgatgagcggagaactggccgcccagagcatcgggaccgcccccctgctcgccggattcgctgctgcgttcgtagtcggctgtctggcctgcaaattcatgataaacatcgttaaacggggaaagctcaactggttcgccatctactgtacgctggtcggagggctggccatcatccgctatttcgtgatccaataatccgcacatgacgcaacaatccgaactgaacctacagggaatcgacttcgaagagggctacatcgccgtcatcgacaaaccgctggagtggacctcctcggacgtagtccgcaaaatcaagttcgccctgcgcagggccggttacccgaaaatcaaggtcggccatgccggaacactcgatccgctcgcaacgggcatcctgctggtctgcatcggcaaggcgaccaaaatggcggacgccctgcaagccgaggagaaagagtacgtcgccgacctgatgctgggcgctacgacccccagcttcgacctcgaacaccccatcgacaggacctatcccttcgaacatatcacgcgcgaagcggtcgaggaggtactccgctcgctcaccggcgaacggctgcaaaccccgcccctctattcggccaagaaggtcgaaggcgtccgggcctacgagctggcccgcgcgggcgaagaggtggaactgcgcaaagcgctcatcaacatctacgaaatggagctcatggaatacgacctgccccgcatccgcatccgggtccggtgcagcaaggggacctacatccgttcgctggccggagagatcggccaggcgctcggcagcggtgcgcacctcacctcgctctgccgcacccgcagcggaggttttcggctcgatgcggcgcacgaattgaacttttttctcgaaaaactgcaaaaagctgaaacaaaataacttatttttcgtatagataaattgacggtttatcttgctccgtacccgcaaaactgcctgcagcgctgcccacggaccgaaaaaatgttcgcaaatacttttagccatgaaactatcgcaatacggttacgacttctccgccgacctgctggcgaaatacccggccgaaaaccgggacgaatcccgcctgatggtggtcaatcgtgccaagggcaccatcgaacaccgcattttcaaggagatcatcgaatacttcgacgaaaaggacctcttcatcttcaacgacacgaaggttttccccgcccgtctgtacggcaacaaggagaaaacgggcgccgagatcgaaatcttcctgctgcgcgaactcaaccgcgagttgcgcctgtgggacgtactggtggatccggcccgcaaaatccgcatcggcaacaagctctacttcggcgacgacgacctgctggtagccgaggtgatcgacaataccacttcgcggggccgcacgctccggttcctgttcgacgggtcctacgaagagttcaaagaaaccctcttcaaactgggcgaaaccccgctgcccaagtgggtgcgcgaaaaggtcgagccggaagacgccgagcgctatcagaccattttcgccagcaaagagggtgccgtagccgctccgacggccggcatgcatttctccaagcacctgttcaaacgtatggagatcaaggggatcgaaaaggcgttcatcacgctccacgtcggcctgggcaacttccgcacggtcgatgtcgaagacctctcgaagcacaagatggactccgaacagttcttcgtggacgaacccacggccgaaacggtaaacaagaccaaacgcgaaggacataagatcgtttcgatcggcacgacggtcatgcgaacgctcgaaacggccgtttcgaccggcggcatgatcaagccgatggagggctggaccaacaagttcatcttcgccccgtacgaattttcggtggccgacgccatggtgaccaacttccagcttccctactcgacccaactgatgatggtttcggcattcggaggttacgacctgataatgaatgcctacaaaatagccaaagaggagggctaccgcttcggaacttatggcgacgcgatgctgattctttaagaaaaatcactatctttgcagaagataggaggcggttcggcaatcttttgcgtgcaagcccgcgcgattgctctcatctttcactatctttgcgaaagataaactttcgtgaagtgaggtacggcagcacgacaaggcaacttttcgcattgcatccggcccgtgccttcttcgccgagcaagctaaaaaatcatcgtttccgaccggcgggcactccgagcacaccgcaccaggagatgaagaaaaaatttcaaccaatggcatcgaacaggatactatacgtctgtcaggaagtggctccgtatgtcccggatacggaaggggcgcttctgtgccggcggctctcgcaggcgatgcaggagcgcggcaatgaaatccgcacattcatgccccggtacggctgcatcaacgaacggcgtcatcaactgcatgaggtgatccggctctcgggtatgaacctcatcatcgacgacaacgatcatcaactgattatcaaggtcgcttcgattccgtcagcccgagtgcagatctatttcatcgacaacgacgactatttcgcccgcaaagccattctccgggatgccgacgaaaactatttcgaagacaacgacgaacgggccatcttcttcgcccggggcgtactcgaaacggtcaagaaactgcgttggacgccaacggtcgtccactgccacggctggttctcgagtatcgtgccgatctatctgaaaaaggtcttcgccgacgacccgattttcaaggaggtcaaaatcgtcgtttcgctctacggcgacggtttcgacaaaccgctggatgcaggaatgaaggagaaaatcgccaacgaaggcgtcaaagacaaaaaactgtcgatcctcgacaccccttcatacgaaaacctctgccgttacgttatggagtatgccgacggcatcattctggcttccgatgcggtaacccccgaaattatcgagttggtccgcaacagcggcaaaccgctcctggaataccagtcgcccgacgcagaggactttttcgacaactacaaccgattctatgattcgatccagtaaaatacgccgggccgccgaattggccgccgttctcaccgcagcgggcatggtcttctttacaggttgcacgaaagtggacgaccggctgggcgcaggctaccaaccgggggatcagcagatgaagatcggtctgaaagttttcgcgctcgcacccgacgccgagcggccctatttcgaaactcgactctacaaaaccgactctctcaaggcttccaacctgggagaggggtatttcggtgtgatgcacgacgaaactttcgggcgtcgcacggcaggtttcctgacccaataccgcgccgtagccctctccgatacgaccggcttcggttaccagcccattttcgactcgatcgaactcaaaatcaaaatctcgaactacggaggcgacaccctcaagccgatgacgtacaacgtctatgaggtgatttcgaacgattacctcaatccctcgctgacagccccggccggagcaggcagcgtcgccgacacccttttctacccgaccttcgatccgaccccctacctcaaccccaatccggtattcaccttcaccttccccaacggcacgacgaccggaccggccacggagtacgtcaccctgcagcctacgcccgaaggacgggggctcatcaagcgtctgatgctgctcgaaggcaagtacaagggcgatatgacgatctaccgcaatccggagctttgggtggactatttcaacggtatttacatcaagccggcccaggaaaatccgtcgggagaagggaacctgttcgctacgaacctcgcggagtcgggtcttctgatgtacacccgcagccggaacagaaccgacccgacgctgatccaggatacgatcacggccagctacctcttctaccgcgaagacgatccctacggcaatgtttcgatcaataccatccggcatgattacaccggctccaagatcaatccggccgacatcgacgagcggaacgaacagcggcccctgaaccccaacgtatatgtcgaagggatggacggcgtaatcacggagctgaccctcacggacgccctgttcgaaggaatcgaagccctctacaaggaggttacggacgaatcgggcatgccttacacctcgatcgccatcaaccaggcggaactgatgatctacctcgaaaagagcgattacgattgggaaaagatcgacgtgggagccatcactcccctgctggacgcatcattcgagcgcttgggcctctatgccgattacaagcacgtactgggcatttcggattactattacacctacgaaaggctctattcaagccagaacttccagttgccgtacggaggttacctcaaccgcagccaaggctgttatgtcatggacatcaccagtcacctgcaggaggtatggaacggctacctgaaatcccagggaatcgaaaccggcggcagccaaacggagaatcccgccccccggacgatctacatcggacccgaagcctacgggctcttcacgatgccctatacatcggcacaaggcatggaaaataccgcaaacaacgcgccgatcaagctgcgcctgatttacacgatgataaaatagcgaagcacctgcggataacctaagtacgaacttaggttatcttgcgttagtgaaaagatactgaatgttatgcaggaaaatttagtaatagtcgagtccccggccaaagccaagaccatcgaaaaattcctgggcaaggatttcgtcgtcaagtcgagcttcgggcatatccgggacctctcgaaaaaagatctcggcgtcaatctggacaaggactacgaaccggtctatgaaattccgagcgacaaacgcaaggttgtcgaggaactttcgtcgctggccaagaagaccaagaccgtctggctcgcgtccgatgaagaccgcgaaggagaggcgatcgcctggcacctcgcagaggttctcggcctgccgatcgaccaaaccaagcgaatcgttttccacgaaattaccaaaccggcaattctggcagccatcgaatcgccccgcacgatcgatatgaatctggtaaatgcccagcaggcacgccgcgtgctggaccgcctggtcggattcgagctatcgcccctgctttggaaaaaggtgcggccccaactctcggccggacgcgtacagagcgtcgccgtacggctgctggtagagcgggagcgggagatcatcgcattccgctcgacgccctactaccgtgtcgtagcacagttctacgccgccgccgatcccgataaaacccttttcaaggcggaactgtccacccgcttcgatacccgcgaggaagcagagactttcctgcgcagctgcatcgacgcccggttcaccgtcgccaaagccgaggaaaaaccggcacagcgctaccccgcgcctccgttcacgacctcgacgctccagcaggaggcgggccgcaaactcggaatgtcggtatcgcagacgatgtccgtggcgcagcacctctacgagcagggtttgattacctacatgcgtaccgactcggtaaatctctcgaagcaggcgatcggccagtgcaaggaggagatcatcaaacttttcggtgagaaatattcgtcggcacataattacaagacaaaaaccaaaggcgcacaggaagcccacgaggcgatccgcccgtcgtatatcgagcggcagacgatcgaaggcactcccgccgaaaagaagttgtacgacctgatctggaagcggacggtcgcctcgcagatggttcctgcggagctcgaccgcaccacgatcgtcatcgatatctccggttcggacgcccagttcgtcgccacgggcgaagtgatccgtttcgacggattcctgaaactctactcggaatccacggacgaggagccgggcgaagagggatcgggcatcctccccaaaatggcccaaggcgagagcgtcaatcccgcgcaaattacggccacggaacgcttcaccgcaccgccggcccgctataacgaggcttcgctcgtaaaacggctcgaagagctcggcatcggacgtccttcgacctatgcgccgaccatcacgacgatcatcaaccgcgggtacgtggtcaaacagaacaaggagggccagaaacgcagctacgtgcaacttacgctgaccggcagcaagatcgccgaaaaaaggcttaccgaaacctacggcaaggagaaaaaccgactccagccgaccgatatcggcatggtggtcaatgactacctcgaatcgcaattcgagccgatcatggactacaacttcacggccaacgtcgaaaaggagttcgaccgcatcgccgacggagagatcacctggaacagcatgatcgacgatttttacggtccttttcataaaatggtcgatcatgcgaccacgacccagacgaccaaaaacaaccagatacgcatcctgggcaccgaccccactacggggcatacggtaaaagcccgcatcggccgctacggtccgatggtcgaaatcgaaggcaacgaaggggaaaagagccgtttcgcatcactcaagaaggggcagttgatcgaatcgctcaccctcgaagaggctttggcgctcttcagcctgccccgcaacctggggccctacgaaggggaagatctggtcatcggcatcggaaagttcgggccctacgtgcggcacggcaaatcgttcgcatcgctcgcccgcacggacgatccctatacgatcggctacgaccgcgctgcggagctcgtgcgcgaacagcaggcccgcgccgctgcagcgaacactccgctcaaaaccttcgccgaagagcccgaactactgattaaaaacggccgttacggtccttatatcgcctacaaaggcaagaactaccgtattcccaaagggaccaaacccgaggagatcactctcgaagcgtgcatgaaaatcattcaaacttctaaaaaataacaaaccccaaaattacgatgaaaaaactgctgttactcgcaggcctggcacttatggtgtgctccgcatcggccaagaaacctgcacagaagacccaggaggaaggctacaagttcaccgacttgaccaccgtaccgaccacttcggtcaaagaccagcaccgcagcggcacctgctggtgttattcggctctttcgttcctggaaaacgaaattctgcgggccggcgggccggagatggacctgtccgaaatgtggatcgtccgcaacatgtatttcgataaaggcgttaaatacgtccgcctgcacggacatctgaactttgcggaaggcggtgccgcccacgacgtaatcgaaggcatcaagaaatacggcatcgtaccccaggaggtctatccgggtctgaactacggcacggagaaaccggtcttcggcgagctcgacgcagcactgaaagcctacctggacgcagttatcaaggcaagaaacaacggggtgctgaccacggcctggcaagacggtctgaatgcgctgctggacacttatttcggcgtgcgccctgaaaaattcacctacgaaggcaaggaatatacccccgaatcgttcgcagcgtcgctgccgatcaagatggacgactatgtagacgtaggttccttcacgcaccatccgttctacacggagttcatcatcgaagtccccgacaactggatgtggggcacggtttacaacgtaccgctggaggagatgatggccgtggtcgataatgccctggccaacggttactcgatcgaatgggctaccgacgtcagcgaaaagggcttcgaccgcatcaaggcgatcggaatcattcccgaaaccgacatcgacggcatggagggtaccgaggccgagaagtggggcaaattgagcgccgccgagaaagaggccgccctctacaagttcgacaaacccgtcaaggagaagaagatcacgcaggagatgcgccagatcgctttcgacaactacgaaactacggacgaccacggcatggtaatcgtgggtacggccgtcgatcagcagggcaatcccttcttcaaggtaaagaactcgtgggacgtacgtcctccctacgacggttactactacttctcgcgtccgttcgtggagtacaaaaccctgtccgttatggtaaacaagaacgccattccgcaggagatccgcaccaaactcggaatttaatccaaaacacaaaatccaaaacagagccggtggatcaccggctctgttttttattatcgtaaaagctctttctgcgcagatatccctatcgttacgaccaacgcccggaggcacccgacacctcctcgctcctgctccgtattcaagccaaatcggacgcgtgcaacgatccgtccgagagttctgtcgtatttcccggatcgagcgaatgccccatcaattcaccgaaagagtctgtaatcgatattttcaaaaaactcagatactccgttccgcatggggccggtgtctgaatttacgaacctggtagaagagcagcacggcggccagcagagaggccgtaccgtcggcaatcggcatcgacatccagacacccagcgtaccgagatgcggcggcaaaacaaggagcagcgggatgaggaacagcatctgccgcgtgagggagaggaaaatcgccttgtgcggcttgcctatatactggaaaaaattggaggtcacgatctggaatccgacgatcgggaaaacgcacaacacgatccgcagcccctcggccgccgtagagatcatccgctcggccgcagctccgtccgcagcatcgacgaagagcatcgccacctgccggggaaagagctgtcccagcaggaatcccgtcgtcgtcacgcaaaccgcacacacgacagtctgccgcaggaccttcaacacccggtcgtaccgccgggcgccgtaattgtaccccacgatgggctgcatgccctgattcagtccagaaacgatcatcaggaagagcatcgccacccgataaatgatgccatacgccccgatcgccacgtcgccaccgtactcccggagcgatttgttcacgacgatcactaccgccgaagcacagaggtgcagcagaaacgaagccataccgatagaaaagatcttgcccacgaccgacgcctgcaagcggaaaatcccccgttcgaaccggatgaaacttccccgggaagagaagtggatgagcgaaaccgagagtgctgcgacctgggccagcaccgtcgcggccgccgaaccgcgaataccccagccgaacccgaaaatgaacagcggattgagcagacagttcaacacgacggccgtcagcataatcgtcatggctctcctcggataacccgaagcacgaatcacttcgttcaggctcaaatacatatgggtaacgatcgtaccgccgagaatgatctgcatgaaatcgcgtgcataaccgatcgtggcatcgctcgccccgaagaagcagagaatggggtccagcagcaacagacctacggccgtaaaaagcgccgctaccagaaaattgagcaacaccacattgcccaacaccccctcggcagcctcccgacgtccctgtcccagccggatcgaggtgagcgccgcagcaccgatcccgatcaacgacccgaaagccgacgcgatgttcatcagaggcatcgaaagcgccacgccggaaatggcgatcggaccgacgccgtgtccgatgaaaatgctatcgacgatgttgtagagcgacgaagaggtcatcgcgataatcgaagggatcgcataacggacgagcagcgacgaaatccggtcggaacctaaacgaagcggggtgacagcctgtttcatcgttacaaaaataacaataacattcggaataacgccccgaccgaccggatttcgtcggcaagaggttcgatttccggccgcccgatacgaaaaaggatttgtgaaacttccggcaaggaggagggtattcgtcccatttcggcaagaagaaggttccgaatcctccgcagccgcccgacatccctccccggcggcaaaacggtctgccaacagacgatccgaaatttcaagagcaccgaagccccgcctcgaagctgccgggcggcatccttgcatccggcgccgcaggcaccgccccaagcgtccgaaaatcaactcctcggcggaacctccatcatagaacgacagacaccccgaaagtcccgaaccgaattacgcctgcaagcataatcacaccaagatataggctgcaagaagctcctcctccctccgaagtccgatttccaatgcggattccccgcaaatacgacccgtcatccggccttcgtccggatcgaaacgctcgatccgtaaatcccggagcagatcgaggttccgccgccccgaatatttgtaaagcgtctccttggcacaccagagggccggcaacaacagcggactgtcggacaactgccgctcttcggcagaagcaaagcggactgccgcccgaccgaaatcgcgggcaagcggctcgatatcgacggcacatggacggtcggagaagcagaccgcaacgtatccggggcagtgggaaactccgatatggagaggataattgcatacgacgggagctccgaccgcattatatgcgatttcggcatccggcagacgacggtaaacaatcgaccgccacatcagaaactcttcgcggcgggaagccggcttcaacgccgcagccaaccgaagatcccgttcgggaaccagccgcagcaaccgttcccaggacaaaaccttttcgatacaaaggatattatccatgcagacggactttgatcttgtcgatgcggtgtccctcgatctcctccacagtgaaccgcacaccgtgagccgttaccgtatccccctttttcaggaagtcgcacttcagttcgagcatcagaccggccagtgtttcggcacgccccttgacatcggcgaaagtaccttcggcaatctccacaatgcgttcgaaatcgccgatatgggtcttgccgtcgaacaggtaggtatctttgtccaaacgggtataaaacacttcgtccttgtcgctttcgtccgaaatttcacccactacctcctcgacgatgtcttcgagcgacacgaggccctgcgtcgagccgtattcatcgacgacgatcgccatgtggatcttctggttctggaaatcggccagcaggtcgttgatcttcttgtgctccggcacgaaatagggcctgcggatcagttgctgccagccgaattcgtcgccccggtcgatatgcgaaagcagatccttgacataaagcgttcccttaatattgtccaaatcgccctcgtaaaccggaatgcgcgagaaacccgaccggatgatggtctgcttgacctgttcataggaatccgtgatggcaacggccgtaatatccacccggggtttcatgatctcctgcacctcggtattgacgaagctgacgatgcccgaaagcatcccgtgctcctccttggaggccgtgcgtgtcatatcgatcgcatcggccagttcgccgatggaaatttcctgatggtgggcagcccgctcgctgatacggtttccggtgcgcaccagcacatacgacaacggataaaaaatccatcgcagcaccaaaaggggccgcgcagcgaaaccggcgaaccgcaaaggaatcgtctgcgccgcgactttaggcagaatctccccgaaaagcagcagcaggaacgtcacgatcaccgtcttgaaaagaaactcgaaacgggcgaaagtgaaaagcgaatcgatgatctccgaagagaggataacgataccgatattgaccaggttattgactaccagaatcgtagccagcagcagatcggccttgcccagcagattcagcatccgccggcaaaccggcgtatcgtgccgccggatcttgcgcacatcgttgcccgaaagcgaaaaaaaagcggtttcggagccggaaaccaacgccgaaaccaatagcaggaacaaagtcacacaacacagcaccacgacatgaaacgtcatgccgtgatagatgatggccgcagcactatcttccaaatccaatccgttttatgttaatcgaacagcgactcggagcggttttcctccgcacgctccgcagcacccttctcctccttaagcacctccttgcggcccgcaggcatctcgacgatgaactgcgccttacgcgactgataagccggtttggcgaggatctggtcgatattgctgtaacgggtcgatttctcgcccaggatcacctgctccagagggcgtgtctgcggagtggccttgccgggcttgcccaccggttccaacaccggctttccggcagggtcgccaccttccggaacaggcttgacgatccgtgcgggcggaatgaccgtcttcatcatccgcttctcctcgtcgccctcgaatcccgtcgccaccaccaccagctcgatggcattgcccagctggggtttctcgctcgtaccccagatgatattggcgttgtgaatattgcccgactcatcctcgacgctggcatgcgcctgaatatactccagaatccgcaccacctcctcgtacatcaactcttcggcattggccaccgagatattgagcagaatgttgcgggctccggaaatcaggttgtgatccaacaggggcgaatgcagcgacgcttcggccaccgcctcggcccggttgtcgccttcggccgtcgctacgctcatgtgcgcgcggccgctgtcccgcatcaccttcgacacgtcggcgaaatcgacgttcaccaagtcgctctcgaccgtaatgatctcggcgatgcccttcgcagccgaagccaggatgtcgtcggccttgccgaaagcctgcttcaaggccagacggccgtatatttcaagaatattctcgttgttgataatcaacagcgaatcgacgttctgacgcaactcctcgatgccccggaacgcctgttcgtaacggatcttaccttcgacggccagcggcgaagtgacgatgccgacggtcagcattcccatctccttggccagcttggcgatcaccggcgaagcgcccgtacccgtaccgccgcccatgccggcagtgatgaagaccatcttggtccccgacgcctcgaaacgctggcgcaccacatcgagcgactcgatggcggccttgcggccgttttcagggtcgttgccggcacccaatccctcgctgccgagccggactttcagttccacgggactcttgtcgagtgcctgctggtctgtgttgcagaccataaagtccacgcccttgatccccaggttccacatgtgattcacggcattgccgcccgcaccgccgacaccgactaccatgataatggaaggattcgtgcgggcagcggccaactgggtcattacatcgtctgtcatatcgtttcgtttctcttgtcttaatcgttaaatctcctcgtcatcggcggcattgaagccctcgttgatcttgtcgagcgtccgcttgaaaatactccgccagttgcgctcctttttcaccggctcctgcacgggagcctgaggcgcgggatcctctccggcatcttccgcctcgggctcggccgctgcggattccgcacgggcagcctcccgacgcgcatacgccgcattgaccgtttccgtagaaggacgtgtcggcgcatagggctggggttgcggccgcgactggggctgcggaggctggaatcccggcacagaggtcggcgggacagggcgacggggcgaaaggcccgccttatcctcgatcacgttgcacgaacccatgccggcccccttgagcaacagtccgacgaccgtggcgaacgcagggttcgcaaccgcctcgcgcgaatcttcgctgatgcctgtttcggcgcttgcgatacgaacgtccataccggtcacacgacggaacaattcgtctatatccttgagtcgggccgagccgcccgtcagcacgatgccgtaggccaaccgctcggcataccccgaatcccggatctcctgctgcacgaattcgacgatgtcggtagcccgggcctcgatgacggtggccaggttgcgcagcagaatatccttggcttcgcgggccgtgcgaccgctcacgcggatcagcttgtcttcgggagcgagctcggcgacagccgaaccgtatttgcacttgaggctctcgacatgtttctcgggaatgctctgcgaacggatgtcccggttgatggcgctcgctcccatcgggatcgtcgccacgtaacgcggcacgccccggtaataaaccgcaacgtcggtcacgcctccgccgatatccacgacggccaccccctcctccttctcatcggaagagagtacggcttcgggcgtcgccagcgcattggggaatacccccaacatacggataccgagccgccggagagccatgtcgagccgttgcagcggcgtcttgccgcaaagtatgaagttgaaagtcgaagacaaccgcttgcagaacgaaccgaccggattgcgcacctcctcggcatcatccaccatataatgctgcggaatacgctccatgatcgtttcgtcgtcgggggcctggacgttgcgcatacgatcgaacagggcatctacatcgccctggttcaccccgttctggggatcgtaggtaaagacgtggtcggtatggcgggcacaacggacgaactcgcccgaaatgccggcataagcctccgtaatccgaacgccgagcgtcgattccacctcggcgacagcctcccggatggcattgcccgcctgttcgatattatcgatccggccggccttgaccccctcgaccggtttggaaacgacggcttcgataccgagcgttccgtcttcgcgtttcgacccgacagcgaccaccacgttcgaagaaccgaggtcgatggctaccgtataactctttttttccactgtgctctatctattttttcattgaatcgtttcccagcctcttccctgcccggcacatattccgcaggcagatccggctcctgcatctcgaaaaccttaccactccgtacagacaacctgcccggcgtacttcacgttgatcgtccgataccggtcccacccggcttttccgagtccctcccggtaaaaccgcagcaacttatccagtttctgctcggcatcgtccaagcggccgaaaaggatggtataattgccgctccggggcgtaagttccaggtcgatagccccgctttcagtggtgcgggccgttatctgaacgatttccgaccgccagaaatcgtcgttttccatccattttacaaaggtagtcagtttcgagaaatcttcgtaccttttctccaaaattttttgtcggcgacgctcggcttcctgtttttcggaaattttgtcgatcgccgactgaatcacctgagcctcatagcgatatttgcggcgcaactgctccttgcgcttgcggagttcccgcacccgctcgccgaaggactccgaagattcgaaccatctctttttaatcagcatccgccgcagcgaacggatattttcatcgttcttcagctcccgccggtaaagagggtatttttcccgttccaactccgcgatcttatcgtcgatctgttgcatctgctcccgcctgtaatccgcagcataccccacataggaggccgggaacgggggacggtaggtacccgtaatcaccggcacataaaccgacgaggcacggggcactgcaaacagatagccctcctcggtcacgtacgaattatagccgtcgatcaacagccgcatcagaggcgtccgctgccagacggcgacatgcagcacgcccgaataggaaaccgtaacccgggcgtcggcgacgaatccattgcgggcgataagccgctccagcgcatccagccgcacggcaccgatcttctcgccgacggttttgatgccgctgcgggcgagccatccccgaacggtagcttccgacaccagccgcaactgcgaggtgctgtccaccacttcgacctcgatgcgcgtcacaggctgctccgcacgatgacggcgcactttgcctcccgcatagagcaaataagcggccacaccgccccaaagcagtgcaagaagcgtatatttcaggtatttcggcattcgtcaatggttgaatctcatcccggcgtttacttccccccccggtacggccgcgacggacacggcctcgaaaaaaacagatcgtccccggcagacggcgaatcaggctttttcccgcaatttttctgccagtgccccgcagcaggcgtctatattgcccgcgccgaagctgacgactacatcggtatccatcgcagccaccttttcggccaactccgcacggtcgcagatcgtccaaggcaccgtcagcaggcggccgatcatctcggactccacacccggaatcggctcctcgcgggccggatagatcggcagcagtaccacccggtcggcatgcgagagcgcctcggcgaactcgcggtagaaatcccgcgtgcgggtgtagaggtgcggctggaaaagcgccgtcagccgccgccccggaaacatcttcttgaccgaagtgatcgccgccgccaactcgcgcgggtggtgggcgtaatcgtccatataaacctgccggggcgtattgacataaaattcgaaacgtcgcttgaccccctcgaacgaggccagcgcctcccgcagacgctccgcatccagcggctcgccgtcccgctccgacgcgcaccagagcgccgccacggccgccacggcattctcgatattgacccaaccgggaatacccagcgtgcacccttcgacaacgccgccgggcgtcaccagatcgtaccggtagtggccgccttcgagcagcgtcacgttacgggcgtaaaaatcgcacggctcgtcgtacgaatagcggtaaacccggataccggggttcccgatcttcagatcgacaccccgcttgacgaccagcgccccgccttcgcggatctgtccgacgaactgcgagaaagcctcgcgcaatgcctcgtgcgtaccgtaaatatccagatgatcggcatcggccgaggtgaccaccgccacgtcgggccacagccgcaggaacgaacggtcgaactcgtcggcctcgaccgccagacgccgcccccggccgagcaccaggttactcgaaaaattccgcgaaataccgcccaggaaagcgcttccgccgcccgtcacccggtggttgagccatgccacgagcgtcgtggtcgtggttttgccgtgcgtaccggccaccgccatcacgaacttcccctgcgaaagataccccagcatctgcgaacgcttgacgatctcgaaaccatgctcttcgaaccagcgcaactcggtatgatccgccggaacagccggcgtatagaccacgatcgtcgtggccggatcccggaaatcagccggaatcagcgccggatcctcctcatagtgaacaacggctccttcggcctcgatctggtccgtgagatgcgaccgcacccggtcgtaccccgccaccctttggccttcgtggaggaaataccgggccagagcactcatgccgatccccccgattccgagaaaatatacgttgagccgttcccgccgttcgccgcacccggctgcggtcgaacaagtccggcgttcctcccgcccgctcgtaacattcgcaatagtagaaaactctttcattcgtcggtttcttcttcgttgtttacgcccggcagaggattcgcacaatctccgcccggcactattttccccgctcggtcgctcccggcggctctatttcgactgcggcaactgtttttcgatttcattcacgatccgctcggcggaatcggggatggccagcgcctcgatattgcggctcaactcggacaaacgggccggatccttcaacagcccgaccgcctcgtccatgacccgggcgaccgcctcggaatcggggatcagcagcgcagcccccttgtcggccaacgcccgagcattcttggtttggtggtcttccgccacgttgggcgacggcacgaaaagggtcggcttggccaccagacagagttccgacaccgtgcaggccccgctgcgcgaaacgaccaggtcggccgccgcataagcgtaatccatgcggtcgatgaatgccccctgccagatattcgccgtaggatgctgcgccaaaaactcgcgcatctcccgctcgtaatatttgcctgtctgccagatcacctgcaccggcgaagcatcgccctgccgcagaacccagaccttcatcatctcgttgagcgtccgcgtaccgagcgacccgcccacgacgagcagcaccggcagatcgtcccggaagccgaaatgcgccagcgcctcgcggcgatccgcacccgctttcgaaaaacgtccccgcagagggttgcccgtcatcacgatcttctctttcgggaaaaagcgttccattccctcatacgacacgcagatcgtgcgggcacgcttggccagcagcttgttggtgactcccgcataggagttctgctcctgaatcacggtcggaatccccatccgctgcgccgcccacagcaccgggccgctggcataccctccgaaaccgacgaccacatcggccccgaagtcgcggatggtgcgccgggccttgcggatgcttttgagcaccttgaagggcaccgccaggtttttcaaatcgaaacggcgctgcaagcccgcaacgggcagaccgacgatccggtatcccaatgcaggcaccttctccatctccatcttgccttcggcaccgacgaagaggatctcgacttcctccccgaagcgccgtcggagcgcttcggccacagccacggcaggatagatatgaccgcccgtgccgccgcccgaaacaatgactcttttcatattttattttcgtttccagcctcggcagacgcatccccgccggcataaaattcctgatttttatccgaaatatctcctaacgaatccttaccgcttccgctgcgggttccggccccgccccgcagacacagccccagcgccacgcccaccggcagccacgcgagcaccgcaccgcgcaacagtcccaccgccgcaccgagcccgatgcccagcagcagcaatccgtccctcctttccggtttccacttcttcatcgcaacatccccattcgattaccggccccaacttccccggtcgagcgaacggtagttgatcgcctcggccagatgcgccgcaccgatgtcggccgtcccctccagatcggcgatcgtgcgggccaccttcacgatccggtcgtaggcacgggcggaaagatcgagccgcaccatcgcccgttcgagcagctcccgcgccgcctgatccagcgggcagaactcgcgcagcattctggcattcatcatggcgttcgtatgcacgcccggcaccccacgaaaacgctccgcctgcacctcccgcgcccgaatcacccgctcgcggatcgcggcgctcggctccgaaggccgcacctgcgaaatctccccgatagccaccggcgtcacctcgacctgcaagtcgatgcggtccagcagcgggcccgaaatacgtcccatataacggtgcaccgcacccggcgggcaggtgcactctttggtcgggtggttgtaatacccgcagggacagggattcatggccgctacgagggtgaaattggccggatattccacgctgtatctcgcccgcgaaaccatgatcttcttatcctccagcggctgccgcagcacttcgagcacgctgcgtccgaattcgggcagctcgtcgaggaacagcactccgttgtgcgccagcgacacctcgcccggctggggcgactgtccgccgccgatcagcgccacctgcgaagtcatgtgatgcggcgcacggaacggacgctgcgagagcaatcccctctctgcgcccaattttcccgccacggagtgtatcttggtcgtttccaacgcctcctcgacgctgagcggaggcagaatcgtcggcatgcgccgcgccagcatcgtcttacccgaaccgggcgcaccgatcatcaacacgttatgtcctccggccgccgcgatctccagcgcccgctttacggccgtctgtcctttcacgtcggcgaaatcctcggcataggcactctgcgacgccaaagttgcctcggcatccaccggcaccgtcgcatcgaatctccgctccccgttcagcagggcgatcacctcgcccagggagtgcagaccgtacacttcgaccccctccacgaccgccgcttcagcggcgttttcggccggcaccacgagccgccgcaacccctcgtcccgggccttgaccgcaaggggcagcacaccccgtacgggccgcagcgttccgtcgagcgagagctcgcccgcgaacatcgtcgtcggaagcaactccccgctcacctcggacatcgcggcgagaatccccacggcgatcggcaggtcgaaacccgccccctccttgcgcagatcggccggagcgaggttcaccacgaccttgcggcccgacatcttgcgaccggtattctcgaaagccgcccggatacgctgctcgctctccttgacggcgttgtccggcagtccgaccaaatagagtcccagaccgcccccggtgagattgacctcgacggtcaccttcacggcgtcgatcccggcaacagcccctgcatacgtactgacgaacatattatcgatctttcactatacaatcaagcgatcttcctccagctccggtccgaatttccggacccgcacttccagagcggcgcccccgccgcgaatgcggcaaaaccggacgcggaaaccggagccggctccgctaaaacggctcctcctcgttcagattcacgggcgcccccgacacaccgggcgtaaggaactcctcgggcacgccgccgaagccgcccagcccggaattggaaccgctcgatacatcctcgtactgccccggcgcagggcgactgcccgcctccggcatcagcgtttcgtccacatcggcgaagcgggcctggtccttcaggaaacgcagattgacatccgtgaccgcaccgttacggtgcttggcgatgatgatctcggccatacccgccgtcggcataccgttctcgtcctgattgataccgtaatattcgggacgatggatgaaagccacgatgtcggcgtcctgctcgatggcccccgattcgcgcaggtccgaaagctgggggcgtttcgaaccgccgcgcagctccgtagcacggctcaactgcgagagggcgatgatcggcacgttcaactccttggcgatggccttcaacgtgcgggagatgaaagccacctcctgttcgcggttgcccttcgaatcctgcgttccgccggtcatcaactgcaaatagtcgatgatgatgatctggatgtcgttgtgtatcttcagacgccgggctttcgagcggaattcgaagaccgacaacgccggcgtatcgtcgatgtaaaggggggccgcccccagcggcttggtcgccgactccaggtggcgccactgctcgggcgtaagacggccgctcttgatatcgttgcccggaatacccgtttcggcgatgataaggcgcatcatcaactgcaccgaagacatctcgagcgagaagaacgccaccggacgttcgtgatcgacggccatgttgcgggccatcgacaacacgaaggcggtcttacccatcgaagggcgtgccgccacgatgatgaggtccgacaactgccagccgagcgtcacgcggtcgatggccatgaaacccgaaggcacgccgttgaaggccgacgtgttcttggatgcctcctcgatctgcatcagcgccttggccagcaaatccttggacgactgtaccgaacgcttgacgtgaccttcggccaccttgaagatttcgctctcggcatagccgatcaactccgtcacgtcagtcgattcgtcgtacgaacggcgctggatctcggtcgcggagcggatcagctcccgctgcacgtacttctgggcgatgattttggcgtggaactccacgttggccgccgagcccaccttctgcgtgagctgcgccaggtacgacgcaccgcccaccttctgcaactccttgcggaccttcagccgctcggtgaccgtatagaggtcgatcggtttgagttcggtcgagagctcctcgatcgcgcggtagatcgtccgatgctcttcggtatagaaagcctcgggcgtgatgaactcctgcacggtgatgatcgaatccttctcgagcatcagagcgccgagcaccgcctcctccagttcgacggcctgcggaggcacgttgccgggggtatcggtcattgcagcgaacgcttcgcggttgcgcgaagcgggggtatattctttagccattcgttacgtggatttcaactttcaaaaatagacaaacggggcgacatatcaaaacgccccggaccccgttttgtcgaaaaatctgtttacaatcgaacgatccccggcaggggattctcccgggccggaaagatgtcgataaaaaggggctttctgtcgattcttttttacggtcccttcggtcagcaaaaggcaccgaccagaatcggcacgcacacctccagtacgatgccgtgcaggatggccagcggcaccaggtcgctgcccgaataacgggcgatcgaaggcagacacacgtccatcgaagtcacgcccgccaccgagatcggggccagcggaccgccccagcgggcgaacagcggcattccgaacagggcgatcatctcgcgcacgacgttggccagcaaagcgaccgtcgccaactcggcggcgccctgcacgccgagcgtcgcgctcttcaggtcggcgatcagcaccgacgaaagcgaatagtagccgaaaccgctgcctacggccagacagtccgtcaggctgaatccccggagcaccagcacgccgagcgccgaaaagagcagggtgccgacgatcgtacaaagcggcaacaggagcatccgccagttgaacgtgcgcagcatatagtgcagattgtcgccggccccgagtcccaagccgaccagcaccaccatcaccgaaagaataatcatcggcagatcgggatccaacagccacgtcgggacggcatcggcataaccgagcgccacgccgactgcaaaaaaaacgaaaacgatcagactatctctcatcgctccctcctttccggaaaaagtaacgccggacgacgaataccgccgcgaaactcccggcgacgccgaggcaggcgatcacggcggcctgccagccgaaacgtccgaaattgacgatcagttcgcggttggaaccgatcgtaacaccgaaaacgaagagcagggcccacacggtaagcgatactccccgctccagcctggccacaaacgaccagttgcgcagcagatagcccgctccgattccggcaaacaacagcaaaacgatacgaaacatagctcaatcgacagttaaaaaagcccgacgagatacattgcaccccgccggaaaaatattataaaacacaaatttcgcgctgcaaagatagcgaaagccgagagaaaacaggaacttgttcccagttttccgaggcgcatcctatcttctacaaagatagcaaaaggtaagtgacaagccaaacccgttcggacctggccggagcaaaatccaaccgaaacacctcattgtcaatgcaaagactactcgatcgaagttaccgatccaatccgaaatggcggcgcgaaacggccagtgcagcaatgctgacccgacagtcgggcaccgcacgaaggagagcttcggtgcaggaaagcagcgtcgaaccggtagtcaccacgtcatcgaccagcagcacgtgccgtccggccaacgctccgggccgcgcgaccgcaaacaagtcgcgtacgttctcccagcgcccggccgaagaacgggtcgtctggctcgggttgttgcgcaggcgactgaccgcccgatcctccaccggcactcccatccgggaagcgatcccctcggcgatataggcagcctgattgtacccccgggccagcaaccgccgggtatgaagcggcacgggaacgatgcagtccacgcttccgtacagtccgctgtcggcaaggttgccgccataccaggcacccaggtcgcgggccgtgcgccagcggttgtaatacttgaaaccatgaatggcccgctgccagggactgcccgcaacgaaccagagaaaagccgaggcctgcacgacgggaaactcgttgcgcagccgctcggccagcggattgtccgcacggcgccagaatccggtctggggtgccaacgtacggcacatcatacagaaagcaccctcgccctcgtgcaactcgccgccgcatacgggacagacaggcggcagaaaaagcccctttatatcattgaggatcgacatcgcagagaatcgtaacgcctttgcattcgggacttttgaccacccggtcgagaatcccgcgcaccgcctcgcgagcccgggccagcgaagcccccgcctcgaccttcagcagcagggtcgccagatactcgccccgtacccgatcgacgggcggggccgtgggtcccagcacgcgccgcccgaaccgttcgcgcagggcggcggccagggcgttggccgcacggcgcagcgtcacgggatcgcggtgacgcaacaacaggttcaggagccgtgcatagggcggatagaagaacgctttccgctcggcgagctgctgacgagccatcgcctcgtaatcgcccgcaatcacctgttgcaagacgggatgtcccggctcagcggtctggatcacgaccgttccgggattttcgcgccgaccggcgcggcccgccacctgcatcagcagttggaatgcacgctccgccgaacggaaatcgggattgttgagcagattgtcggcgttgagcacaccgaccagctccacgccgccgaaatcgaatcctttggtaatcatctgcgtccccaccagaatatcgtcgtcgccccgggcgaaggcctcgacgatctgccggaaagcacgctcggaggtaacgctgtcgcggtcgagccgggcgacccgcgcctcggggaaaacgcgggcgatctcctcctcgaccttttccgtcccgaagcccatcggcacgggttcggtcacccggcaatgggggcacttggccggaacaggctccgtatgaccgcaatagtgacagaccatacgaccgcttcccttgtggagcgtgagagtcacattacaatccggacagcgggccgtccagccgcactcccggcactcgacatagggtgcgaaaccccgccggttctggaaaagcatcgcctgaccgcctccgccgagggtctcctccatacggtcgagcagcaatttgttgaaatgggcatgccgctcgccgcgtttcacggcacggatcgtatcggacacgaggatctgcggcatccgcgacggtccgtaacgctcggccagtaccacgctgccgtattttccggtcgcagcgtttaaataactctccagcgacggagtagcgctgcccagcagcgtacggcaccccagcagtcgggtcatcagcacggcgcagtcgcgtgcctggtagcggggcgccgggtcggtctgtttgtaactgggatcgtgttcctcgtccaccacgaccagctccaggcggcgcagcggcaggaagatcgccgaacgggccccgatcaccagctcgccgcccgcagaatcccgcaagcggaggtaaagctccgtacgcttgcggtcggtgagtttcgaatgataggcgatcacccgctcgccgaaaacctgccggagccgatcgaccaactgggccgtgagagcgatctccggcacgagcagcagcacttgtccgccccgggccagcacctcggcagcgaagtgcatataaatttccgttttgcccgaaccggtgacaccccgcagcagcacggtcgcgcgatcggcaaacacggcacggatctcctcggcagccttccgctgcgcagcggaaagcgtcggcagacgaaactgcgcaccgccagtcaccggaccgggtgcgacctcccgttcgatacaggtcaataacccctttttcaccaggagagcgagagccgtccgatcggcggcgagtcggctccgggcgacttccgccccgtcgggcgcaagggcagccaactcctccagcgcctcccgctgccggggggcacgacgccccatacgttccagcgcggcggccagcccgtcggcggtgagcgcttcgccggccagggccacgaaccactcccggcggggccggaactcgtcggcagcaaactcctcctcgccgtgtccgctcggcttcatcagcgacggcagcgccacgcgcatcacctcgcccagcgtgcacatgtaataatcggcgacccactcccagaaacggcgctgccgctcgtcgagcagaggcgtaccgtagagcacgcgggagacggtcttgacggtcttgaaatcggggcgccggtcgtgcagccgccagacgatgcccgtgtagatcttcgatcggccgaaaggcacgactacggccatcccctcgcaaagcgtcacgccttccgccaccgcaaaggtgtagagaggctgggccagaggaagtacgatgtcggcatagcgcatggtcgtagcaggatcgaaaaggagtgctttcaggctgcggaaccgaccggcccgtccggagccgagccgcaaccgcaaaacgacggaatcaattcggtttttcttcgggtaaagttacgcattattcccggaaaacaaatactccccgccggatcgacgaggagtattatttcaaatcgaagaagattccctaattcttcttcataccgttgagcataccgccgtcgatgataccgaagccctgtccgtaaacacccgttaccgaagccaccgaaacgaacgccttggggtcgaggttgcggacgatcttgaggatgtcggccgtttcgcgtttgcggcaaataaccatcactacctgcgacgactctttcgtgtaccatcccatgccgttgagcatcgtcaccccgcgatgcgccttctcgacgatctctgcggcgatacggtcgtgctcatggctgatgaccagaatctgattcgactgctggttgcccgccagcaacgcatcggtgctcagaccgaataccgccgtcagcaggaagccgtagatcaccgtctcgatgccgttgcccaccagcagcgatgcacagatgataagcgaatcggtcaccagcacgacacggccgtagttgatcggatgatacttgttgatcagcagcgccacgatatccgtaccgccggtcgaaccgccctgacgaaaacacatatagatacccacaccggacagcataccgcccatgatgaccagcagcagcggttccagattaccgaacaggctgatcgcatcgggtgggataacgcccagttccgcgagccacgcctgcacgccgggcagtgtttcctggaaaaagttcagcgacgcaggaagcacgatgatacagaaaatcgtcttgataccgaaattccaaccaatgatgaaacctgcgaacagcagcagaataccattgacgatgaacgccatcgtaccgatgttaatctggaagttgaacaggttttcgatcgccccgcacaacaccagcgccgcacccgtggcaccgccgccggtaccgtgtgcgggcagaatacaggcgatccacgcgaacgtgtagaggagaataccgatcgtcatcacgaaatattcccgtactacgcccataatcgtcccgaaagttattttttccttcaacagagtcatttttctttgaacaattaaggtttaacggcgcaaaggtataaaaatttcgccttgatacgcgttccgtgccgttaatcttttttcaagcagggaccaaagggtggaaacccgcgttaaatgccactgcgtcaagtggtgaaatcccatcggcacttcgctggcgatacgctccacagccatatcgggacgcagccgccgcaacacctcgaccaccagcgagagatactcctcggaggtacgcaggcggaagcggccgggctcggcgtcgtattgggcggcaagggccgttccccgaacgagctgcaactggtggaacttgaccgtttcgagcggcagggcattgatccgctccacctgccgaagaagcatttcgtcgtcttcgccgggcagccccagaatgaaatgggccccgacgtgcaacccccgtgcggcgctcgccgcaatagcctgccgggccgccgcgaagtcatggccgcgacggacggcccgcaatgtttcgtcgcaggtggattcgacgccgtattcgaccgccacatagtgtttccgcgccagctccgccagcaaatccaacttctcgtcgtccacgcaatcgggccgcgtgccgatcaccagtcccgaaatccggggatgatccaacgcttcggcataaagctcccgaagtcgcgtgacaggagcgtgcgtattggaaaaaggctggaaataggccagacaaagcccttcgtcccgccctcgggccgcatggaaagcgattccctcgtcgatctgccgcgccaggctcttccggggcgaacagtaggaaggggtgaacgccctgttatcacagaacgtacacccctccgatccgatcgttccgtcccggttgggacagctcaagccggcatccaccgcgatcttacgcacccgaccgccgaaatgtcgccggcaatacgccgcgtagctgtgccagggtcggccgtcgccccaagaatagacccgggtttccattcggaacgctacaagccccagtccgacggattgtaggtatccttcggcgcattcggcacgttggcgaagaaggtaaagcccgtcaatcgctcgatttccgccaccgacatcatatctttggcctgcggctcgtgccctttatccatgttatgacgcagcacgaaggcggcgcacttcaattcgctcgcggcacaatccatcaccgattttttcgtatttccgttcttggtccgcagcagcaggtagtagaacatcgaaggccggctcacgtcgctgcgtccgccgaaatcgattttcgacgaagtgcagctcttgccgtaagcatcggtgaaaggttcgaaataggtgcctaccacgatataagtcgtatcggcgcaaacctgcgcatcgacaaaactttccagattgttccatgccccgccgccgttgttgaagttcgacgaatattgcggcgcgatattcgaataatagaatacctgttcgttggttttccgggtcacgagccgttcggccgaaccgagcatatggcccttgttgcaaccgccgccggtcgatttactgctgtattgaataccggacggaatatccggatcgcgactgtaagcgtccgtacgatccgttcctttcacctcgtagcaagcgtggcgcggagcggccacccagaccggacagtggtgctcggcgctgaagcagaccgtataattgcgggctttctggctgccgacatagaaatccgggcaaatatgatgcgcatagtagtagtcgctgttctgcacctccaccggcaactcggcccagccggtacgatagacgttttccgggggggggactgttccgctctcagtggtgaaagtaccctcctcgctccgatactgcttgccgccgatcgaggcgtacagatggaacgtataggtggtcgcggcactcaatccggtaatggccgcacgcttatctcccgacgaagccgtcaccgttttcgtcgtgtaatccgtttcaccggagggtttgtaagcaaatcctacttcgatgccgaccgtttcttcgccttcataggtgaagctgcccgtcagggtggccgacgaagcggtcacatccgtcgcagcgacgggaccgaactccggctcgggattttcacccgctttaagggtcgtgaactgcgcgacggcgctcgtataacgctcgtcgccgacaacgacatacgcataaaaatcgtatttcgtttcaggttcgagcccgttcagctcacaggccaggggcgaagccgtcgaagcagccttcacctcggtatattcctcctgcgcaccggccttatacccgaagccggcttccgcaacatcgccgtcgccttcgtactcataaacgcaggcaagcgtcgctccggtcggagaaaccccggacgacgaaggcgtttcgaactgcggagctcccggttgctcgccctccttcaacgtggtaaaaacgacccgttcgctggtgtaattctttccgtcgatcaccagataggcatagaactcgtaagccgtttcaggcgtcagctcctccagacgggccgacaacgaagagtcgtccggcgtaatttctaccatagtatatcccgtttgggccgatgccgcaggcttgtatccgaaaccggcttcggcaatatcggccgcatcaccggtgtatagataagcgcacgcgagcgatgcgctcgtagcctgcacctcggaagccgaaggcttgccgaactggggcgtcggagccggaggcacctccccctccttgagggtcttgaacgttttcgacagcgacgcattgaaccgctcgccgcccaagacggcataacagtaccaacgatattcggtgtcgggcttcaggccggtcagggtctgccgggccagaccgtccttgaaattcgtacaaaccacatcgacgtactctccgcccgcttcctggtaggagaagccgacttcagagatgggcacttcgcccttcgattcgatgttggccgccacgaccgcactcgtcacatcgggctgcgcgtcgatcagatcgaaagtcggacgcacggtcggcgcaggcgccgtatcgtcgctttcgcaggctacgatcgccagcgacagcaaggcgaccatacacaaaaaatacttcttcataacgaactttttatatctttgacatagcctcggataggatgcgattcggcaatctctgcgtgcaagcccgcacgattgcgctcatctttcactatctttgaaataactgaagtcattcgcgttgtcgggagtcgatccagatcgtcaccggcccgtcgttcaccagctcgacctgcatatcggctccgaactccccggtagcgacttcgcgcccgagcgcacggcctacaccggcggcgaaccgctcgtacaaaggtcgggaaatcgcttcgggggccgccttgatataggacgggcggttgcccttacgggtcgaggcatgcagcgtgaactggctcaccaccaatatttcgccgccgacctgccgcacgtcgagattcatcaccccgttttcgtcgtcgaaaatccgcagccgggtgagtttacccgcaagccactcgatatcctcctcgccgtcctcggcttcgataccgacgaaaaccaacagacccggtccgatggccgatttgagggttccgccgatggaaaccgacgcacggcgcacccgttgaatcaaaattcgcatggcaacaatgaaaattgtcgggcgaagaacgcccagagattatcttctttcggcacgggcgccgtcacgacgatccgctcgcgccgcacgggatggatgaaatcgacacggtacgaatggagcgaaatgcctccgtcgggattcgaacggcgagccccgtatttcaggtcgcccttaatcggacagccgatcttcgagagctgcgcccggatctgatggtggcgccccgtcagcaaatcgacctccaccaacgtataacgggcactcgcccccagggtgcggtaacgcaatttcgccagttttgcatcgccccggggcgcatcgagcgcccgcgaacggttggttttctcgttacgcaggatatagtggcacaactctccctcttcgggatcgggacggctctccgtaagcgcccaataggtctttttgatctcaccccggcggatcatctcgttcaggcgggcgagggctttcgacgttttggcgaaaatgacggctccgctcacgggacggtcgatacggtgcaccacgccgaggaacacctcgccgggcttggcatcgcgccgccggatgaactccttgatctgccgttcgagcgcatcgccgcccgacggatcgggctgcaccaggtcgccgcaccgtttattgacgatcaaaaggtggttgtcctcgtacagaatatcttcgggagcaaacatcggaaacggagcgtaattgcgaagcggattataactggaacgtgaaaggaagcagccgcacggccgaatccaccaccgtggcaccgcccgcaccggacatgatgatacggatcggcgacctctggcgacgctccgcatcgagcagcacctggcggcactgtccgcagggatagcactcccgctcggacggctccgaagcgatggccagcgcctcgatcggatcgtcggcatggcacgctccggcatggaacagcaacgaccgttcggcgcacatgcccgcaggaaacacctcgctctcctggttgctgccgcagagaatcttcccgctgcgcaaacgggccgcagcgcctacccggaatttggaatagggagcgtacgcccgggcgacggcccggcgagcctcctccaccaactcccggtccccggcgggcatcccctccggagagtcgtagtgctggtaatcgaaactgaatctgttctccataattccttgcttttgaaaaaagggaaagtggtcaaaggtaagccgaatttccgggttatccaaaaattcggcctgccaattcatttccgacgataaccccgattattcgaggacgaacttggtctggacgttatactccagcttgatcgttttgaaatcgagcgaaggctcttcgggcgcacccgcttcggcgctgtcggccatcatcgccttcgaacgcaccatcatcatattgtcgtaatactgcggagccacgtcgtaattcgaatcgtagatatagaaacattttccgatcttctgcccgatcgccccggccagcgcttcggccgacgacttggcgttgtggatggcatccaggcgcacctgctccttcagggaatcgatgtccgaacgggtcacgcgtacgataccgacgttcgagatgcccagatcgcccagggcggcggtcacgtcacctacttcggccgccgaatggagcagcaactggtatttggcggtggtcagcgagctggccttcttgtagaaatcgctcgacatattggccaccttgagctgtttctcgacatcgacgcccaacttcttcagggcatcgatcatctgccgctgctgagtttcgaccgtaatttttcctttcgactcgcgctcgttgattacgatcgacagatagaattcatccggcgtaacctccatctgggaacgtccgttcacctgaatataactcggaaaagcctcctgggtttgagcgaacaccggcgcagccaatacgaccgccgccgctaaaatcatccattttttcatacgtttcattcgtttttgaaatagtactgcaaatataacgcccgaacaggagccgatagtataaaaaccgccccggaacaggagccgcctaccggcggacgagcttcaccacgttctccacgtggtgcgtatgggggaacatatcgaccggctgcaccgcctcgacgcgatacgcgccgtccatcagggccaggtcgcgggcctgcgtagccgggttgcagctcacatagacgatccgctcgggcgccgcccgcaggatcacgtcgattaccggctcatcgactccggcacgcggcgggtcgaggatgatgacgtcgggacggccgttgcgccgtatgaactcgtcgctcagcacggctttcatatcgccagcatagaacaccgtattcccgatgccgttcagcgtcgaattgatgcgggcgtcctcgatggcctcgggcacgtactccacgcccacgaccttcgcgcaccgcgccgcacagaagttggcgatcgtacccgtgccggtgtaaaggtcgtataaaatctcttttcccgtcagggcggcgaagtcgcgcgcgaccttgtaaagttcgtacgcctgcgccgaattggtctgatagaacgacttgggtccgaccttgaactgcagcccctccatccgctcgatgatgtgatccttgccccggtagcagacgggttccaggtcgccggtggagtcgttgaacttctcgttgattacatagaacagcgacgtgatttcggggaaagcggccgccagatggtccagcagggccgcgatcttctcccgctcgtcggcatggaaaaccacgatcaccatcacctcgcccgtcgaggcggtgcggacgaccatgttgcgcatcagcccccggtgctcgcgcggattgtggaacgtatagccgtgttcgaggcagaaacgccgggtttcttcccggatcgcattcgacggatcgggctgcaaccagcatttttcgatgtccagcactttgtcgaacataccggggatgtggaatcccagcgccggggcatcggcgatctcgcccttttcggcgatctcctcgtaggtgagccagcgccgctcggcgaaggtgaactccagcttgttgcggtaaaaacgggtttcggccgagggcaggcagggcgcgatttcgggcagctcgaccttaccgatgcgggcaagctggtcgcgcacctgctcggtcttgaaacgcagttgttcggcgtagggcagattctgccacttgcagccgccgcagaccccgaaatgggcgcagaacggctcttcgcgcagcggcgagcgcttcacataattgacgacgaaaccttccatataccggcggcgcttggagcggatctgcacatcgaccacgtcgcccggcacggtcatcggcacaaagaccaccacgtcattgtaacgccccatcgccttgccttcggcggccagcgtcgttatctcaagcccctcaatcaggggataattcgctttctttcgagccatatcgcattcggatttagaacgcaaaggtacgaattttccgctatgcgccgcccgttttcctggttttggcacgttcgcgcacccgtcccagccagaaaccgatgccgaacggcacgcccagcatgatgacggcgaaaagcacgatccaggcgaggagcttggccaccagagccggtacccggtccatcgcattttgtaccgccgcatcgaccgcctgctgcgcctgatcgaccagcgctttgcgctcggccgaaatataaccctgcaactccgcacgctggcggtcgaggtcggcaaatgcgttgtccacggcaccgttcaacgtttcgatgagcgctgcgacttcggtattcagacttttgcccatataatcggcgatctgcggcaggtgctccatgaccgtcacgatgcggtcgaaattacgctccaggctgtcgagctgccgcgtcagccggttgcggacgctgtcctgctgcatctgcaactcgaaaatatccttcgaccagccgatgctattgaccatctgctcggactggccgccgaaacggtcgcccagatcggcgatcacatcggagatggagcctacgttatactgcgtttccacgcctttcgactggagaaattcgatccagggcagggtcgtattgaccggagtgaactgcgaccccgtgacgggattcgcctgcatataattccccacgaactcctgcatcaacgcgaacttctccggcgcaagcagggtcgaagccaggtgttcggctttcttgtccagacgcgccacgaccttgcgcacgagcggcgtctgcccggcgaaaagcagcgaatcgggcaggcggcggaaagcgctgtccatgcggacgcagagcagccaggtgtcgatgagcgccacgtcggggttggactgcatgacggcggtaacggcggcccgcgtcgcctgcatcttccaccggatcgcccggatccgcaccggaatctccgacgatgcggccgcgaccgaatcggccgtgcgggcgatctcgtccgccaggtcgtaataaaatccccgggtcatcatccgggtattggcctccgaagccggaagcggcgggttgcccgtatcgaccgacaccttgagcaacgaacagcttccgaacgacagcagcacggcgaccgccgcaaaaattttcagtaaacgtatcttcattcttctctctgttttgactttcaacaaattactgttccaggacctctgcgcccgctccggcagcgccgtttctttccggcgctccggttccaaaaatagcgattatccgcgaaatatcgctatatttgtaccttaaataaatttcacatatcatgaaaatcgcctgcctgactttcaatccgatacaggagaacacctacgtcgtttgggacgacacgaaggagtgcgcggtcatcgacgccggaaattccacccccaaagaagatgccgcactcgacggtttcctcgccgaacacgggctcaaaccggtgctggcggtcaatacgcacggtcatttcgaccacgtgctgggcgtcgaacatctgcgcaagacctacggcattcccttcgccctctcgggcaaggacgccttcatgctggacaccgatgcggtgggatcgaccgtttacggggtcaaaatcaacgccatgccgaccatcgacatcgatctggacaaggtagaagaagtgaaattcggccacaccgtcctgcgcgtcatccgcacgccgggccacacgccgggccacgtatcgctctacgaacccgaatcgaagagcctcttcacgggcgataccctcttccgcgaaagcatcggacgcacggatctgccgggcggcgactattcgtggatcatgcgttcgatcctggacaacctgctcccgctgggcgacgaagtgcgcgtctatcccggacacggccctgaaaccaccatcggccacgaagtgctctacaatcccttcgtcaccgaagtcctcaaccaggaggtgaactacaagaactaattccgtccgggtccgttatgaaagcgctgctccacaaaatcctctaccggacgcttccgctcgaaggttatctgcgggcggtgagccgcctctttttcatcagctaccggctggggcttggacggcgcagcgcggcgaccgaatacgtctatcacctgccccggctggcgaaagccggcgacacggcgatcgacatcggagccaatctgggctattacgcccgtcctctctcggaaatcgtcggcaccgcaggcagggtccatgccgtcgaacccgtcccggtcgtttgccgggtgctgcgccgcaacctgcggggctgccgcaacgtcgaaatcttcgactgcgcgctgggagccgagaataaagagatcaccatgagcaacgactccgcccgcgaaacgggttatctcggcacgggacgaaacttcgtgggcgatgccgccggagagggcgccgtcactttcaccgcccggatgcggcgcggcagcgagcttttcgccgggctggagcggctcgatttcgtcaagtgcgacgtcgaagggtatgagttgatcgtcatgcacgagctgcgccctctgctggagcgtttccgcccgacagtactgatcgaaacgggcggcgaaaaccgcccgcagatcatcgaactcttcaccgaactggattacaagggttacacgctcgagaacgggcgggaaattccgctcgcccccgacaccgaaaaagacatcatcttccgccaagcacgctaacgccatgagaatagacatcctgaccgtcgtacccgaactgctcgcctcgccgctgaacgaatcgatcctcaagcgtgcgcaggagaaggggctggtcgaaatccatatccacaacatccgggactacacagaagacaagcaccgcaccacggacgactaccccttcggcggagaggcgggtatggtaatgaagatcgaaccgatctaccgctgcatcgaagccctcaaagcggaacgggaatacgacgaggtgatctacacctcgcccgacggcatccgctacgaccagcacgaagccaaccgcctctcgacgctcgacaacctgattatcctctgcggccactacaagggcatcgactaccgcatccgcgaacacctggtcacgcgcgagatctcgatcggcgactacgtgctcacgggcggcgagctggccgcctgcatcatcgccgattcggtgatccggatcatccccggagccatcggggacgaagcctcggcgctcacggactgcttccaggacaacctgctggcaccaccggtttacacccgacccgccgagttcaacggctggaaagtgcccgacgtgctcctctcgggcaatttcgcccgaatcgaccgctggaaggaggagcaggcctgggagcgcaccaaacggctgcggcccgatttactgaaagaagaataagacttacgatatgcgttactacctgatagccggcgagccttcgggcgacctgcacggcgccaacctgatgaaagggctgaaagcccacgaccccgaggcgaagttccgcttctggggcggggacaagatggccggggtcggaggcagcgggaatctggccaaacattacaaggaaacctcgtttttcggcatcgtcgaagtaatcaaaaacctgcggacgatccgccgccagatgaaagagtgccggcaggacgtcgaggcgttcgcccccgacgtgctgatcctggtggattatccgggcttcaatatgaagatggctcgctgggccaaggagcacggcatccgcgtcttctactacatcgccccgaaagtctgggcctggcgcgaatggcgggtgaaggcgatccgcaaatacgtggacgagctgttcatcatcttccccttcgaacgggactacttccccaagcacggcatccggccgattttcgagggcaacccgctcgtggacgccatcgaagcacgtcgggcatcgctgccctccccggacgaattccgccgtcgccatgcgctcgacgagcggccgatcgtggctctgctggccggcagccgccgcagcgagatcaaggccaacctgccgctgatggccgacctggcccggaaattccccgaccggcaattcgtggtcacgggggtttcgtggctcgaccgctcgatttacgaacaatatatcgcggacagcggcatccgctacgtctgcgaccaaacctacgaaacactcgcggcggccgaagccgccgtcgtgacctccggcacggcgacgctcgaaacggccctgctgaatgtaccggaagtggtagtctatcgcacgctctggttccaggtgaaattgcagccctacgtgctgaaagttccctacgtgtcgctggtgaacctcaacctgggccgcgaatcggtcgtggagatcatccagtccgacctggacatcacacgggccgaacgggagttgcgggccatccttacgggcggagaaaaacgggagcggatgctccgggacttcgccgaactgcaagccgtaatcggggctcccggcgccagcgaccgcttcgcggcccggatggtggagctgctgaaaaaacaggtgcggtaagatgcgcgaactgttcacgacatacccgacgcaactcctcggcggagggttgttggtcctgctcggcattttggttcggtttttcccgaacctgatcgccggctacaacacgatgtccgccgagcagaagaaaaacgtggatgtcaaaggattatcgcgtttcatgtgcttgagcctggcggcgatcggcataggctggatcgcattgggtatgctggccggaaatctgggcggcgaaaaatgggttttggcggtggattttctttggctgcccgccggatgtgttttcctcttggtcaaagcgcaaaaatacgaccgcaacaaataaaccgggcacaccggacggacaggacatattcgaacctccctttcgaggagaacaagaaggggcgaaagacgccctacctgcaaccctttttgattttaggggtgcaggttttgacacgacgagacgaggaccggacgggacatactttatgtatttcccattcgggatgagcgagaagggacgaaagacgccccacctgcaaccctttttgattttaggggtgcaggttttgacacgacgaggcgaggaccggatgggacatactttttctttcgtgaccgacatccgcaagaacctgattgcacccaacggagtagccgttgtgaaaggatcgagcaactacgcggtattcacaggagatattttcgaggtcctgatcggaaaagccggattacgtattcaaaacgggtatgtatataagagagataccgaccatacgacctggacaaagatttgagaaacgccattggagacagtcgtagatgaattgaagaatttttaatagctgcgatggaccatgtatggaatacatcggttgtcggcagaaaagtaaaagacgaagtagaatcggtcagcatcgaatctgacaaataaagtccttcgggggaggacacaaagaatcccccggtttgttagcagtcatctcacctacataccaacaaatgcacgattactcgcagcgaccgggggataaagcctcctgctgcgagtaattttttgtgtcgttccctgtacaggaaacggctggtatgtagatgagatacgcaaagatactaatttttataaaacagcaaactatgagaacccctatttcctactatggcggcaagcagacaatgctcaagcacattttgcctttgatcccatcgcataagatctatacagaggcattttgcggcggtgcggccgtcttgttcgccaaacggccctccgaagctgaaatcatcaatgacatcaacatggagttgacaaacttctactggtgtatgcaagtttactattcagacctcaaacacgagattaacaaaacactacacagccgggacctacacgcccatgccgggcatatcaactcttatccgcagttctttactcccgtcgaacgggcatgggccgtatgggtgctctgtaaaatgtcgtttgcgtcaatgatggacgggacgtttggatatgacttcagcggcacaatgaccaagaaactgcgtaacgcgaaggaggagttcacagagcggctttgtcagcggctcgaacgagtgactattgagaaccgaaatgctctcgacgtgatcgcctgctatgatgctcccgatacctttcatttcatcgatccgccttatgtgaactccgattgcggacactatgaggatacattcaacgagcagaatatggagcaactcttgcaattgctcgaaaccgtcaagggaaagtttatgctcacgatgttcccgttcgatatgatcgaccggtatgcccggaagaacggatggattatccatcgtatcgagaggacgatcagtgcctcgaaatcaaatcgccgcagacaagaggagtggatggtctgcaactacgaggaacgggcacaggcatccctgttcgagggtgagtatttaggcgaataaatggagctggtattgattcatcttgaaataaaaaaccgttcgagcggtagtcaaacgccattcgaacgatgtgttttcttgattcgctttacatatttcccgtaatatgtaaacggatcatgcatttgctttacatatattcggcgcgtgtgcgaaatttcagtcgcttttcgttttgagcgaactcaaccctcgaaaagtcacagctggttctgaaatccgtcgcatttggttttgccgattatattttgcaaaagtacaaaatcccccccccgtgcaagttttcgggcagaaatgttacttcggaatgaaaaaaagcgttttttcggcagcgtacccttgctgttattcgcgcccgtgtagtcgggtgatgacgatcgcttttggcctgtcagcggtctatcccgtcgcgggaaaggacgccctgcgtgtagtaatgtttgatttcccgcatttcggtcaccaggtcggccgcgtcgataagttcctgcggggcataacgtcccgtgacgacgacttctaccgccggatggcggcggttcagggcatccagtacggcgtcgatcgtcagcagtccgaaatgcagggcgatggtcagttcgtcgaggatgactacgtcgtattcgccgctctccagcagggcggcgcagcgggtcagaccgtcgcgtgccatccggatatcgatcgcttcgggatccttgccgataaaacatccccgacccaactgttcgatcttcacttggtcgaagagttgcccgattttcgtttcgttgtatcgcatcgacttgacgaactgtccgatgtaaacgcttttgccggcgcacaaagctcgcacggccagtccgaacgcggccgtcgtcttgcctttgccgtttccggtatagacgtgaatatatcctttcgttgagtccatgcggcaaagatagtgcaggtttgtggcagagccaaataaatttgggcggaaccgagggcgaccgctgtccggaaagacgatataaatccgaatcgaagcggggtatatttgctctcatgagcaaggccggttgcgaggtgacagccggttgtggaaattctttccagcggattttttgcaaaggcggaaaaggtcggagcaaattcgtgccggaaaaaatttgaaaatagaatccctttcgttttttcgggaatacgtcgtttcagaggttgatccggttggcttgcgtgaagatggcatcgagcagccggaataactccgcttccagctcttcgcctcccggatcgccgcagagtgtgaagatttttcccggaggagccccgtagcatatcgtgccggccgcaccgcaggtttcggacccgcagatgatgactgcatcgatcgcatcctcgtgacgcatcaaggcgttgtaaagagccagcaactgccggggtgcggttattttcgggacggggagcaacgctccgcaggttccgatttcttcgatcgaatgaatgagttccaggtcgtaacgtccggcaatcagctcggctgtatcggccggtattccatagagtatgatattcatcgttatcggttaaaaaaaagtgcggcgacatcctaatctcttgaatgttatggcagtaacaatggttatcgccgcactttcgtttgtcgttcattactggaaataccgctgtggcagacgaggaaatctcttgtaccggaacggtacaacgatccctgtgtcgggacggttttcctaaaatttatcaagcgaaacacaaccgaaatcaaacgcctaacccacgagcgcctttgacgtcgaatcgatctggcaggtcttctgactcactcctgttccgaagccttcccggtccgtgcggaccagtggcagagatgttcgaaacgttgcggagcttcacagcagcgggactgtccgggattcacacccgattcccttttcattcctctccttgcataaggagccggaaaccaaatctgccgcaaatataacggtatttttcaggaaacaaaaactctttccgggaatttttcttttcgccgattgtttccgattcggcgggaatacactacttttgtaccgccatgaaaacaaaacaggaactcaccgacattctcgatttcgtcgcggaatacgcttcctatctgttaggatcgggagtgcacacttcgcgtgtgatccgcaacgcacagcgcatcggaacctcgcagggagtggatattcagttgtcgagttttcagaaaagcataatcatcaccgtgcacgacgaacggagcggcgaagtcgttacccgtgtggtgaagatccctgcgctgcctatcagcttcgaacgtaattcggatctgagcgctttgagttgggatgccgtcgatgaacacctgtcgctgaccgacctgcgcgaccgttacggagagttgatcgccaagccgcgtatggacccgattttcgtcctgctgacggtcggcctggcgaatgcctccttttgtcgtctgttcggcggggactggacggccgtgggcatcgttttcacctcgacgctcgtcggtttttccacccggcagtggatgcaggcgcatgccgtgaatcacttcctggttttcatcctttccgcctttctggcttcgctctgcgcctcgtcggccttgggcttcgattgtacggccgaggttgcgatagccaccagcccgctctttctcgtcccgggcgttccgctcatcaacggggtgatcgacatcgtcgaagggcatatcctgatcggttgcagccgtctgataaacgctctgctgctgatcgtctgcattgccgtaggtctttcggcgacgttgatgatcgttaaaaacagtttgctatgattgcggtggatattctgctcgacgggttgttcgcagctgtggccgctatcggattcggggcgatttccgaccctccggtccgggcatttccctgtatcgccctgttggcggccgtcgggcatgccctgcgtttctgcctgatgagttatgcggggatcgacatcgctacggcttcgctctgcgctgccgtcgtcatcggtttcggcagtctttggttgggacggggtattcgttgtccgatgaccgtgctctacattccggccctgctgccgatggttccgggtatctacgcctacaagacggtctttgccctcatcatgtttctgcaatcgctcaacgatcccggacaggggctggaatatatgcagcagtttttcctgaatgccaccgtgtcgttcagcgtgattatcctgttggctgcgggcgctacgctgccgatattcatcttcaaccgccgggctttctcgctcacacgacgcagacagaaccgcaagtaaactcttttcgtatggatgttttctggaatacgatcgccgcatacaacgccgccacgtggcccgtgcagctcctcctggtcgtggtcgccgccgtactgacccttttgctttacctgcgtccgacgcgtgcggtgcgtgtggcgatgaaggtttttatggccgcattgaatttctggatcgcgggcgtatattattttctctattgcgctccgcgcgaacattacgatattctggccttgttctggacggtcatgggctgtatttggatctatgatctggcggccggacacgattcgctcgggcgcacgggacgacactcccagtttgctttggcgctgttctgtatgccgctcgtttatccgcttttctcgctggccctggggcgtacttttccgatgatgacctcgcccgtgatgccctgctcggtcgcggtcttcaccgtcgcgttgatgctggctttctccgagcgggcgaatatcgtgttggcgacgttcctctgccattgggcgttgatcgggctttcgaaggtctattttttcgggattcccgaggattttctgctggcgtgcagcgtcgtacccgctctcttcctctttttccggcgttatatccggaatcgggcctgcgaatccaccaaaccctccccgcgtgtgctgaatgcattgcttgccgtcctgtgtgccgtcatcggggttttcttcacttttacgcttctgcatcaattcgatctctttaccgaaatatgatcccataccgagccgaagatttcagcgtgacggtttccgtcgccgattatatagcccgtttccgcgatgccgagcgtttcgagggctgctgccgcgcctgtccgaactatgggtgcagttggggatgccctcccttcgatttcgatgtcgaagagtatctgaaccggtattccagggcattgcttattgctacgaagatcgctccggagcagcgcgaccttcccattgcggaggcaaagcggttgatccaccccgaacggcagcggctcgagagacgtctgctcgagatggagcggcgatacggaggacgttcgttcgcctacgtcggcagttgcctctattgtcccgagggtacctgtacacgccccgaagggaacccgtgccgccatcccgaactggtgcgtccgtcgctcgaagcctgcggcttcgacataggtcgcacgacttccgagttgttcggaatcgaactcaagtggggagccgacggaaaaatgcccgagtacctgaccctcgtgtgcggttttttccacgatggggacggtgtcgtgtggtaatcgcaagatacgaaaaggctcgctgtacagcgagcctttttcattccggaacgatcctcctatgcctgttctgccaggatgcttttacgcggatggaagatgttgaggttgagccgtccgacgatgtcgctcaaggcagcctgggccttgaccgagttgccggcgtcatccagcgggggtgcgaaggccgctacgcccatcacgcccggaacgacgcccatgatgccgccgcccacgccggtcttggccggaaggcccgtgttgaagagccagtcgcccgtatgctcgtaaaaaccgacggtggccatcatcgaggcgatgcgcgtacccagatcgggcttgaagaccgtctgtttggttacggggttcacgccgtcgaatgcgatggtcgcagccgcgaccgccagttggcgggccgttacgccgatcgaacactggcgggtgtagaggtcgagcgccatatcgggatcgtcgtagatgcgcgaatagtttttcagcagccacgcgatcgacttgttgttgaagttggtcgcggtttccgatttgtaaagttcgtcgatgacctccacgctcgagccgcagagtccttcgatgaatccctggatcgcctcccatttcgcgtccggcttcccgatgggttttatcatcgagcaggcggcgatcgcaccggcgtttaccagcggtgtcgaagggtgatccttttcgagcaggatcgccatgatcgagttgaaaggcagtcccgtagcgtcggcaccgatcttcgtcagcacctcttcggggctgtattggttcatcgttagaatggccgtcggcactttcgataccgattcgatgccgaacttgtattccgtgtcgcctgcggcgataatctctccgtcgggcagacagacggcgatgccgaacaggtcggacggtacgttggccagatagggtatatagtcggcgtttttacctcctgtgaccgctttggtctgttcgaaggcgtgctgtacggcgtcccgaacgtcttgtttcgtgagtttttgtcccatgacgattgcttttattgtttgttttcaggagccgtattacccgtattttgcgggttgttttgcggaatgttctgtgtttccggggctgcttttacttcccaatggaagggtgcgaattccgcagccgcctgcgggtctttccacgagggcttgcgcatggcgtagatgacgaacggagcgcctaccactaccacgcagccgataatgagtacggagaaccatacggtgttgctgccgaccgagatctggctgggcggaacgaagctgaggatgaaggcgagcagtgcgccgcagaagccgaccgtaccgatcgtccacatcagaccgttaccctttttgcccaggcggaacggacgcgcggtgcctttcatcttgtagcgcagcacgatcgccgccgagaacatcagcatgtacatgatcaggtagagcagtacggtgagctgcgagaggatctggtagaacgactgtaccgaaggcattacgacgaacagcagcgccagcagcgttaccacgccgccctgaatgagcaggatattgcgctgtacgccgttcttgttgctcttctgaaagaacggaggcaggtaaccggctctgcccacggcgaaaatacctttcgacggacccgatacccaggtcagtacgcctgccagtacgccgaacatcagggcgacggcgataatcggcgaagcccacgagatgcgcagataatggaagtagttgtcgaagccgatcaacagcgactgggtcaggttgatgtctttggccggaatgatgaagcccagcgagaacgtgcccagcacgaagatcagcacggtcaccagcgagccgatgacgatggctttcggatagttgcgcgaaggattcttcacgtccatcacgtgaatacccatcatctccataccggcatagaagaggaagatgctgctggccaataccaggttgtcgaaattcgtcaggtcggggaagaagccctgcgacatatccatgtagttatggccgccggtcgaaatgtaaatgatgcccagaagaatgagcagacctgccggtatgatcgtaccgatcatacctccccatttgctgattttgccgacccagtccatgcctttcagagaaacgagtgttgcgacccagtaaatagccaatacgactattagcgtgaagaccttgttcgacgcaagtgacatgtcgtacgtttcgttcatgccgataaaggcgatcgatacggcgccgaaggtcagtaccgtcgggtaccagatcgtcgattcgatccactgaagccagatggcgagaaatcccgtgcgtgcgccgtacgcttcgccgacccagcggaatacaccgccctgtttgtcggagaacatggccgccagctccgcagccaccatggccgtcgggatcaggaagacgactgcggcgaacaggtagtagaatgccgacgataagccataaaccgcttctgcgggaagacctcgcagacttactacggcagtgatgttcataattgcaagtgtcatcacactcaatttgaaccctgtgctggttgtagcttttttcacatccataataattgaatttaaaaattgtttgaactttattcttcattttcccggttcggcagcgtccgggagaaatccggcgttgcgcttataccttgaaaatgtcgttttatccgtctgtttgaagctcgttttttcgtgacgatttgtaaaattgcaagtaccgtgcaaatcggtcggatgtttccgatttttgttgtggaccgccgtatcgcttcgtgaaaaatggttatatttgtgctgtatgaaatgttatcccggcaggtcgaagcgcgtgtttgttatcgggcctttccgtttgccgtctatgattaaggtatttcccgatatagcttcatagatttggcactgtctcgggtttccgtatgattgaagttgtgcgttatgttgcgatattttttctgtttgctggcgcttccggtgctgttgtcttgttccggccgcaaatccgcaccggcgacggctccggaaaaggtcccgccgcgtcttttccgggttgtggctccgcccggagcgatggacgacgcccagcggtatgcctatctgcgcgagcatttttgggacgatctggattttgcggatactgtttttatcgtttcgaccgacacgatacatatgttgcgtgcgttcgatacgtatatccggaatttcgttatggaaagcgacccatcgcctgtcgcggagctgatgcgcaaggcttccggatcgaaaaccatgctggagtatttcgctatgctggccgaacgggtgctgcacgaccccaactctccgctgcacagcgacgaactctatattcccgtgttggaggcactcgtggcgagtccatggctcgacgagtgggagaagatcgctccggagcacgacctgcgtatggcgctgcaaaacagggtggggctgcctgccaacgacttccgctatacgctcgcttcgggccgtacggggacgctttacgggatccgggccgactatacgctcgtgtttttcaataaccccgactgcggcatgtgcgaacggatccgggcggaaatcgtcgcctctccgttgttgtcggagatgatccgtgcgggacggctcgaggtactggcgctctatcccgacgaagatctcacggcgtggcgcgctcatgctccgcaggtaccgtcgttgtggatcaatgcctacgacgcaggagcccgaatcagcaaagaggagctttacgatctgaaagccattccttcgatgtatctgctggaccgagataagcgggtgctggctaaagatgccttcgaggtggggtatatcgaatggctgctcgaccggcagccgcagtgatgggcgtataggtttgttttatcgccctatcagtaaaagtgatcggatttttgcggaacgtgaccccgataattcctatctttgcttcgcaaacgaaataacacacacaatctaacaaaataaagagaagaattatggctaagaaatggcgttgtaccgtttgtggatatatccacgaaggtcccgaggcacccgatcagtgcccgatgtgcaaagtaggcaaggagaagttcgttgaggtcgaggagaaggccggtggtttggatttcgtgacggagcataagctcggcgacggcaaaggcgccagccaggagttatgggaaggtctgaacaaccacttcatgggcgaatgttccgaggtgggacaatacctggcgatggctcgtcaggcggatcgtgagggctaccccgaaatcgccgaggctttcaagcgctatgcctgggaggaggccgagcacgcttcgaagtttgccgaactgatcggcgacatcgtttgggacaccaagaccaacctgttcaaacgtatgaatgccgagtgcggcgcctgcgaggacaagatgcgtctggcgcgtctggccaaggagcagaacctggacgccgtgcacgataccgtacacgagatggccaaggacgaagctcgtcatggatctggtttccagggtctttacaatcgctatttcaaggcgtgatttggaggtagtataaaaggagaaggggtcgctcgattcgagcgaccccttctccttcggattttattcttgcggtactttttgtcagagtttccgcagaagactttcgagaacggagcacaagatgctgttcaacttgtcggtgatccagttgtaacccgagcgtacgatctgtgccatttcggcgatgttgtcgagctggtcgctgatgtattgaacggcaggacgtaccgaaaccagatagacgatcagggcgatcagggcgaaaacaccgcccagaatcaacgtagcccagatcatcgagccggtcagttgtgcgagccagatgacgagggcccataacagcatcaccacggcgatcagggcggtgattccgaatacgacgatcggagtgatcagatgtctgcggggttggttctcgttcattgtcgtagaaagttgggccgacccgggcggactattcgtcgcactcgctgcatttgccggttacttcctggtatttgttgcgtgccttgtcgattcctttgttggcgagatcgcggagcgattcgcggacttcctgacccgtgcggggcgttaccaaggcagtgatagcggcacccagtaccagaccgccgatgaatgttgcgatacaagttgtatttttcataatcgtgaagttttagttcgatcgaaagagttgcaaatttcggaccgttcttgtgggctgtgaagcgctattgttggccgttaggttggaaaatgacggcagattggttacttttgggcgtggaagcagaaaaaaatcgttccgtggcctttaccggccatcaggattatgacggcagggccgacggaatcctgcgtgctgtggtgtatcggctgtggtcggagggcttccgcttctttttgagcgggatggcctgcggtttcgacctggcggccgccgaagcggtcctcgctctgcgcggggagtgtgcgggaatggagctcgtcgccgtcgttccgttcgccgggcagccggagagtttctccgacgccgataaacggcgttatgcggacgtcctgacagcggccgatcggacggtggtgctggccgacagttacagccggggatgttattaccggcgtaacgattatctggtggatcatgccgtgcgcgtggtcgcgtggtacattcgcagaaacagcggcacgggttataccgtgcgtcgggcccggcatcaggggatcgaagtcctgaatctctacgaggataagatgaacccgacgcttttctgaacggattcgctttccaatgctccgaacgggttgttctctctatccggcggtcgggagcgatcccgggatctgccgaaatcgatgaaagactgcgacttcggagagaccttgtttcgacggtattcgctggatctgtggaacgtgtgtcccgtgccgttctatcctgtgccgttctatcctgtcccgtcctatcctgtcccgtcctgtcttgtcccgtcttgtcctgtcctttgaggcggatagtcgttcgagatttttgttttccgaagcgccgggattctctttcttgtctgcgtggaaaataatccgtaactttacgcgttttataattcatcgctgcggcagagagccgcgcttttattcgtcgtggaagaaaacaacatcaaaatactcggtgcgcgggtgcataacctgcaaaacgtcgatctggaaattcctcgcgggaaactggtcgtcatcacaggactttcgggttccggcaagtcgtccctggctttcgatacgatctatgccgaagggcagcgccgctatatggagacgctttcgacctatgcccggcagttcgtcggcacgatggaacggcccgatgtcgataagatcacgggactcagccctgtggtggccatcgagcagaagaccaccaacaagaatccccgttcgacggtcggtaccgtaaccgagatcagcgatttcttgcgcctgctctatgcgcgggcttcgcgggcttactctccggtcacgggcgaggagatggtccactatacggacgaacagatcgtcgagctgattctcaaagagttcgacggacgcaagatcgctgtgacggccccgatcgtcaaggggcgcaagggccattaccgggagctgttcgaaagcttgatcaagaaaggttatctctatgcccgtatcgacggcgagatccgggagttcacccccggtatgaagctcgaccggtacaagatccatacgatcgacctggtgatcgaccgcatggccgtcggggattccctgcgcgagcggctgctcatctcgctgcgcgaagcgatgcggcagggcaaaggaacgatggccgtctatgactacgaaacggggaagatgcgttactattcgcgccatctgatgtgtcctacgacgggtgtggcgttcgaagatccggcgccgcacactttctccttcaactctccgaagggagcctgccctcattgcaacggtctgggggaagaggcggtcttcgaccgggagaagattctgcccgatccggcgttgtccctgcgtgatggcggcgtggagccgctcggcaagtatcgcaacaacatgcttttcgccattctcgaaatgctggggcggcgttacgatttcacgctcgacgatccggtggggacgatttccgaggagggtatgaatgccattctgtacggggattccgagccgctgacgatcaatctcgccgagttctgctcgacgggcggcaacaacctggtctcctgggaaggcgtggccgaatacatcggccgcaccgaggacgaggactccgcccggagccgcaagtggcgcgagcagttcctggtttataagaaatgcagcgtctgcggcggtacgcgcttgcgggacgaggcgcttcatttccgcatcggggggctgaacatcgccgaagtgtccgcgatgtcgatcgcccgtttttcggaatggatcgccgacatcgaaaaatatttttcgcccaaggagcggaagatcgcccaggagatcgtcaaggagatccgcgagcggctccggttcctcgtcgaagtggggctgggctatctctccctggcccgttcgtcgcgttcgctgtcgggcggcgagagccagcgcatccgcctggcgacccagatcggttcgagactggtgcacgtgctttatattctcgacgaaccttccatcggcctgcaccagcgcgacaacgagcggttgatccgcagcctcaaggagctgcgcgacgcgggcaattcggtgatcgtcgtcgagcacgacgaggatatgatgcgggcggcggactatatcgtcgatgtgggacctcgggcaggacgcaagggcggccggatcgtcgcggccggttcgttcgacgacatcctgcatgcggattccattacggcggattacctcaccggttgccgtcggatcgaaattcccgaaaaactgcgtcccggcaacggcaagagtcttattataagaggtgcacggggcaataacctgaagaatgtcgatgtcgagtttccgctcggcaagctgatctgcgtgacgggcgtcagcggctcgggcaaatccacgctggtcaatgaaactctgcgtccgattttgagcaaattgctgtaccggtcctatgaccagcctctcgaatacgattcggtggagggtacggaacacatcgacaagctcgtagtggtggaccagtctcctatcggacgctcgccgcggagcaatccggcgacctattcgaatgtcttttccgacatccgcaagctgttcgaatcgacgcccgacgcccagatccgagggttcaaggcggggcgcttctccttcaacgtgaagggcggccgctgcgaggagtgccgaggagcgggcgtgcagactatcgagatgaatttcctgcccgatgtctatgtcacctgcaaggcctgcggaggccaccgttataatcgggagacgctcgaagtcaaatacaaagggaagaacatcgacgacgtgctgaacatgacggtcaatatggcggtcgagttttttgccaacattccctcgatccatcagaaactcaaggctattcaggacgtgggactgggttatctgacgctcggccagccctgtacgactctgtcgggcggcgagagccagcggatcaaactttcgagcgaactctccaagcgcgatacgggtcgcacgctttatattttggacgaacccacgacgggactccatttcgaggatatccgccagttgctcgacgtattggccaaacttgtcgatcggggcaatacggtgatcgtcatcgagcacaatctcgacgtcatcaaggtcgccgaccatctgatcgacatcggacccgaagggggcgaggagggcggccggatcgtcgctaccggtacaccggccgaagtggcacgctgtccggagagttatacgggcaggtttttacagaaattgggactttaggcaaggattttgcaatttcatgatgcaaaacctctttgcattatgaaaaagattttcgcattggcactcgttgccgttttttgcctcgcaggttacggggtaagcgcacagacacagagtaagaaccagaaattgagtcccaagcaggagaagcgggaggcgcgcgagcagcggcgtgcgcagcgtcaggctgaatacgaacgctatatcgattctctggttacatcgggcaattttcagttcatacccaacagtatgcgtgttatgccggccggatcggagcacctgattaccaatccgaatttcggattgcagtattgggacggagaattcgatattttcctgccttacgtcaagggtgcggtgatgccgtattatctgacggtactcaactacacgatttccaatcccgaggagaccctcaaggagcagagccccaacggttgggaggtcactttcgtcacttcgctcttctctgcgaccaggtatgtctttacgctggatatttatgccaagaccggcggtgcgacgctgaccatcaccaattcctggaacattacggtgcagtattcgggtacgatcacttcgctgtaacggcggttttcggatgagttttccgaaatattcgaaaggaaggctgtggatttcgatccacggcctttttccgttcgtcgaaggtgtctttctttcgaaataggcgaaaaatagtatctttgcagaagatcggatacgcctcggaaaactgtgagcaagctcccgttttcttctcggctttcgctatctttgacttcgtcttagatactccgcctcggcaaaatgcaaatggatttgcttttgcgttcggcttattcgtatctttgtgaatcttaacgcgtgcatgttatgcaggatattataaacggacgctgcggctggtgcggaaccgacgagctgtatgtgaaataccacgacgaggagtggggccggttggtgaccgatgagagaaaacttttcgagtttctcgtcctggagagtgcacaggccggcttgagctggatcacgatcctccgaaaacgggaggggtaccgcaaggccttttgcgatttcgaccccgagcgggtggctcgcatgaccggagaagacgtggagcggctgatgcggttcgacggtatcgtgaaaaaccggctgaagatcgaagcgacgatcactaatgcaaggctgttcctggctgtccgggaggagttcggcagtttttacgactacaccctgtcgttctttcccgacggtaagccgattaccaactctttccggtcgttgagcgaaattccggcttcgtcgcctcagtccgatgccatgagccgggatatgaaaaagcggggattcaagtttttcggaaccacgatttgctatgcccacttgcaggctgcggggtttattgacgatcatctggccgattgcatttgccgaaaaggtaaataacggtataatttgaaaatgaacgacttctgttccgccttccgtgtcgtgcgctggaaattccggaaccgggatatttcgcagaagctgcgaatctgacggagcgagcgggagagaggatattaacttattgaatttacgatgaaatacgcgattatttcgactgaaaaaggcgacatgaaggcggagctctatgagaaagaaacgcctgtcacggtggagaattttgtgaatttggccgggaagcggttttatgacggactgacgttccatcgcgtcattcccgatttcgtcattcagggcggctgccctcggggtgacggtacgggtggaccgggatataccattccctgcgaaacatccgccggacgacaataccacgaccggggtgtgctctctatggcccatcggggcaaggatacgggcggctcgcagttctttatctgcatgaaccgtgaaaatacgcagcatttggacggcgtacatacctgtttcggtcgtgtgatcgaaggggtggatgtgatcgacgacatccgtcccggcgatctgattctctcgattcggatcgtcgaggagtagatttgcgaaccgccccgaggctgtttgtcccgacccgctctgttccggccgcttcattgcaagagcctgccggaaagtcggtattcgcatcaacggaccgaatccggcgaagatgttgtggggtcgcaccggaggttcagaaggtcgtaacgataatcgccgcagcccaacttgggctgcggcgattatttcggatcggtcggaagcagaaactctgccgccggccggtgcttcggtatcggggaatgacgcaggtcgggtgattcggcccgcttcccgtagaaatcattttcccgacgacggatttgcaaaagcagcccgggaaagcgtccatgtcggaagcggggtagtcgggggctgcatctattccctgtaaatcagggcgaccgccgcgacggaaacgccctcttcgcgcccttcgaaaccgagccgctcagtcgtggtcgctttgacggaaaccgcgtcggtgtcgattccgatcgtgcgggcgatcgtttcgcgcatccggtcgatatgggggcgcagtttgggccgctgcatcgagatcgtgcaatctacgttgcccacagcgtaacctttctcccggagcagttccacacagcgtgccagcaggagcttggagtcggctcctttgaattcgtccgaggtgtcgggaaagtgcaggccgatgtcacccagggccgcagcacccaacagggcgtcgctgatcgcgtgcagtaccacatccccgtccgaatgggcgatgcagcctttcgcatgctcgatttctaccccgccgaggatcaggggcagcccttcgccgagggcgtgtacgtcgtagccgtagccgattctgaatttcatcattcccgaactcattttgtggtggaacgtcccggatcgcacgagggccttcctgttctattcatccgtacgttccgtattgcattaacggaacgtgcggatttttttacagaccgccgagttgcccggatatgttgcaaaaatagtcataaaaccggatttctcccaagccgaatgcaattcgatccgatatggggccgcgtgccgtttccgaaaggggtgaccccgcttgacggttccggattgttttcgtacttttgcagatgtcgcacagcggacctgtgatgatattttcaccgtcttatgaaggatttcgtcgcgatcgattttgaaacggccaacagagaacgcaccagtatttgcagcgtggggctggtccgggtggagaacggggacatcagggagaagatctatcgcctgatccggccttatcccgactattacagctcctggaatacccgcatacacggtctgacgtatcgggatacggcgcacgcggctccctttccggaggtttgggccgacatctctccggagttggcgggtttgccgttggtagcccataacagtcctttcgatgaaggttgtctgaaagcagccttccggcaatacggcatggcttatcccgattatcgttttttctgcacgtgccgggcgtctcgtcgggttttcggccgggaattaccgaatcatcagcttcaaaccgtcgcagcccgctgcggtttcgatttgcgggatcaccatcatgcgctggccgatgccgaagcctgtgcctggatcgcccgcctgattctgtaaaagggagagagggtagggcattcgctcatatcgtcctcgttcggcatgggcgcctgattctttcgatcattttcttcggaaaaacccttcgaaagcggcttcggctcgctgttttttcgtatatttgacttcatccaatatactcgcgctcggtcgagttaaaataaattttgctcggcactcgacttattcgtatatttgcaaaaggcgaatttgcgtgcggacaggttacatgccgtaaaacgatgttttgttggcggccggatgtcttttcgccggatattcgaagctgccggtatcggctcgaacccgaatcgcgttcgttctcgacttttgccggcaggaagaacaagaccgatataaaaccttataagaaatgtcagagattacaaaattagaaccgaagctcgtctgggagctgttcgatgccattacgcgggtgccgcgtccctccaagaaagaggaaaagatccgggagttcctcgtggatttcgcaaaaaaacacaacatcgactatcagaccgaccaaacgggtaatgtcgtgatgcgcgtgcccggtacgaaagggtatgagaaccgtccctgcgtcattcttcagtcccatatggatatggtgtgcgagaaaaattcggacacggcgttcgacttcgacaaggatcccatccgcacgaagatcgtcgatggctgggtgaaggccgaaggtacgacgctcggtgccgacgacggtatcggtatggcggcagcccttgccgcgctgctcgatcctgcattggaacacggtcctctggaggcgctgttcacggtggacgaagaaaccggtcttaccggtgctttcggattgggtaaaggaatgcttacgggccgttacctggtgaacctcgattccgaggacgaaggcgaaattttcatcggctgcgccggcggcgttgatacgctggctatgttccgttataagacggaggccgcacctgaaggccacgtctttttccgggttcgggtatccgacctttcgggcggacactccggcgacgatatcgataagggccgtatgaattccaataaactggtcgcacggttgttgtggaacggcgcccagcgtttcggattgcgcctgagccgtttcgacggcggcaacctgcgcaatgccattccgcgcgaggcgtatgcggttttcgccgtgccgagcggttcgaaagccggcttcgaggctttctataaggagtttgccggggaacttgcagccgaagccaagttccgggaaccgaatttcaagatcggaatcgaagaggtgccggccgcatcggtgatcgatgcggcgacccagcgcaacctgctttacgcgctcgtaggactccccaacggagtgatcgagatgtcgctggccatgccgggacttgtcgagacatcgaccaacctcgcttcggtgaaattcgaaggggacgatcggatcgtcgtgaccacttcgcagcgctcctcggtggagagtgccaaggtctatgcgtcgcagatgatcgaatcggtgttcgctttggcgggtgccgaggtgtcgcattcggaggggtatcccggctgggcgcccaatccccagtccaaactgttggaaatcacggttgccagctatgagaaacttttcggtgtgaagcccaaggtgcgtgcgatccatgccggattggagtgcggcttgttcctcgagaaatatccgcatctggagatggtttcgttcggtccgacgctgcgcggcgtccattcgcccgatgagcggctcgaaatcgcaacggttcccaagttctgggatctgttggccgatattctgaaaaaagtcgagtaagtttctgcgtggaatattgatttccgaatcatatcgtctggtcgatcaagtcattcattatcaaatgaatgacttgattttttgattatacggatcgtaggaagatggtttacacgggtaattctcgggatgatattctcgatcttttttattgtcaaaggccggatactctgtattttatgacaatgaaaaccgattgttcgacaggtttgtacgggtatttgtgctgcgcctgccttccggcgaggtgcaacgaaggcagaagctcggagaacggagccttgcgggatacgtaattaaaattgctcgccgctatcgaacgggatagaatggaccggttgcgaaaaaaaattaggaaagataatttcgggggatcggtatccgaaccgatccttaatcacaaaatgaatcaatatcggtattatgttaaattatatgagaattttattgcatcggccaatatgtcggtatttacgccgatgattatataatgatttataaaacaggtattatccgtgatttctttgtgttttgccggagacaaatatgctcgatgcaggaaagttttgtaatgttgcagaccgatcgatctttgatatggatgtggacaattcgtgcggatgtcgttaattttagtaaatttgcaggtaaatatatttgtctatgtttcgaaaaatcgccatattttcgctgataataccgtggttgcttttcagcggctgtgcgtcccgacccgccgacgagcggccgacgatcttcgtatcgattcttcctttgcgcgggatcgtttccgaaatcgtcggcgatgactttcgggtcgaagtgctcgttccgcccggtatgaacccggaaagtttcgagccgacaccccggcagatgatcgatctgaatcgttcgcagttgatattcaatatcggttggatcgatttcgagcagaatatgctgtccaagatcgaggaccgtcgaaaagtaatcgacctgcatcgtggtatagagccgattgcgggcagttgctcccatgcggacgcggagaaagagcaccgacacggcgtcgatccccacatttggacctctccgcgcgaattgcgcactatggccgataatgcttatcgggcgattcacgagctgtatcctgattctaccgtatatgcggttaattatcagtgtcttgccgataaattgcaggctctcgatgattctgttgccgaacggctgaagcagagcggagtaccctatttcatgatttaccatccggccctgacctactatgcccgtgcctatggaatcgagcaggttgccatcgagcaggatggcaaggagccttcggccaaacggctggcccggcttatcgagcaggctcgccgggacagtattcgtgtcgtattctaccagagccagttcccggcttccaccgtcgaagtgatcgccgaagatatcggggcgcagagcgtccggatcgatccgctggccgaagatgtcgtcggcaatatttcctatattacggatctcataactgccgaacgtctatgaaaactccgctcgtttcgcttcgccgcgtcagcgtgtcgtacgatggtcacgacgcgctcaaagaggtcgatttggatatttatcccgatgattttctcggtatcataggccctaacggcggaggtaaaactacgcttgtcaaggccatcgtgggaacgatcccctatcgcggtacgatctcctattcgccgcagttgtttcggggaaaggagcggttgatcggctatatgccccagcaatcgatcttcgaccggagttttccgatttcggtgctcgaagtggtgatgtcggggcttcaggggcaaaggggtttccatgcccgctatgcgtccggggatcgagcgaaggcacaggagctgctgcggacggccggtatcgacgggatcgcccgcaaacctatcggcgagatttccggcggtcagatgcagcgggcgttattgtgtcgggcggtgatttcggatcctaaattgttgattctggacgagccggccaattttgtggacaatcgtttcgaaaacgagctctatcggatgctcgccgagctgcacggacgaatggcgatcgtaatgatttcgcacgatctggggacgattacgagtgtcgtgcggaatatcgtttgtgtgaatcgttatgttcaccggcacgattcgaacatcattaccgaggagcagcttcgtaattacgactgccctattcagcttatttcccacggcaaggtgccgcatacggtgcttgcattgcacccgcacgactgttgtccacatacccgtacggaggaatagcccggcttttccggtatctatcttcaccgatgaagattacgaccgggccaaagccatgtacgacgaacgcatggccaactacggaagcggtgaaaagtaactcccggattctctgaacgaatagagccgcaatagctattgcggctctattcgcttcctcccctctcgctgtccggcagacagagtacctcgttccggaaaaagtgttgcgccggatcaacaaaatgtattccggcatatatgcgtccgttggcttgccgccattgtttgttgtcgtacctgttgcctgcacattgggcggcgatgccggccgcaggatcccgatcgtttgtggacataaaaaatacttacggagttgcccccgtaagtattcgagtatgattcgggataattctctatttgttgatctcgctcaacttttcgaacaatttgccgaacgaagcctcgatttcgcggcgcagcgctgcaaagtgcttgcgcaccagcgaaggattatgtgcatcggccggattgttggccttgacgaaaagcgcgttgcgaagagccacaccctcctgcatcacttcgaaaatctctttctctttggtcggctggaagcagatcgccatgtcgcagtcgaacacgagttcctccagacggtagtcgatctcttttttcagcattcttaaatttgccatatctctattcggttttaatataattattcctgtaaaaaatcatacacggatccacgtacctctccccgacttgtcggaagcgttcgccgcactctgtccgatgcaaaaattaaaagagtgcgagcagtcgccaaccctgtgatttttgtttccctttgccggacagatccgcacccgaatacctcctattcgtttttcagtcgtcggctgtccaaatcaatccgagccggcttacctgccgcaaagaagaactgcatcctatcctctgcaaagatagtgaaagccgagaagaaaacgggagctcgttcacagttttccgaggcatatcctatcttcttgcaaagataaaaaaatcttccggaaatcgagtgcagtcagatcacaaaattcaattacatccgctccggtacgtcgattccgagcagcgccatggccagacggatcgtgcgggccacctgttcggccaggcgcagccgcatgtcgcgggtcgtcgtacactcctctttgaggatcgaatggtcgtggtagtagccgttgaacgatttggccagttcgtaggcgtaagcgccgacgatcgacggagcgaaattcgcggcggcggcctgtacggtcgccggatattcggtcagcgccttgatcagttcgatctcttcgggcaggagcgccgcagcttcgtcctgggtgcggaaatcgatccctgcctcctctgctttgcgcaggatcgagcggatgcgtgcatgcgtgtactggatgaaaggacctgtattgccgttgaagtcgatcgattcgcgggggtcgaacagcatcgtcttcttgggatcgaccttcaggatgaaatacttgagggctcctaacccgaccatcgatgcgatggcgtcggcttcctgcgcggtgcagccgtccagtttgcccaattcgtccgacatctcgcgggcggtcgataccatgtcggcgatcagatcgtctgcatcgacgaccgttccctcgcgggatttcatcttgccttcgggcagctcgaccatgccgtaggaaaggtggtagatgtggccgctccattcgtcgtatcccaacttcttgaggatcagcttgagcacctggaaatggtagttctgttcgttgcccactacgtagatcatttcgtccagccggttctcctcgaaccggcggaacgccgtgccgagatcctgcgtcatatagaccgatgtgccgtcgccgcgcagcaataacttctggtcgagtccgtcggccgtgaggtcgatccagacagaaccgtcctccttgcggaagaagataccccgggcgagtccctcttccaccaggctcttgcccagcaggtaggtttgcgattcgtaatagaccttgtcgaaatcgacgcccaatgccttgtacgtcacgtcgaagccttcatagacccacccgttcatggtttcccacagcgaatatatttccggatctttggcctcccagcggcgcagccactcctgcgcctgtcgcatgatcggagcgtttttcttggcctcctcctcgctttgcccggcggcgacgagctccttgatctgggctttgtagtgcttgtcgaattcgacgtaatatttaccgaccaggtggtcgcctttcatccccgacgaggcgggcgtttcgccgccgccgtagagtttccaggccagcatcgacttgcagatgtgaataccgcggtcgttcacgaggtttaccttgatgaccttgttgccgttggctttcaggatctgcgcgacggagtatcccagcaggttgttgcggatgtgtcccaggtgaaggggcttgttggtgttgggcgaggagtattcgatcattacggtacggcccgtcggtgcggcctgcccgaaggtgtcgtttgccgcgacctcccggaagcgtgcggcccagaatgcactgtcgagcgagagattcaggaatcccttgattacgttgaacgccttgatttccggcgtattggccaccaggtattcgccgatctccgtcgccgtggcttcgggcgacttgcggctggctttgagcagggggaacaccacgagcgtatagtcgccctcgaactctttgcgggttttctgaatctgcaacggagctccggcattcccgtagagggtgcttaccgccgctgcgactttatccgtaagaaactgttcaatattcatcgtatgtcgaatttgggtgcgaatttacgctttttatccgaataatccgcgtcgtcgcctctcaataatgcgtcggatagcgaattgcatccgtcgattttcggaaaattgcaaactattgttatatttgcaaaccgtataggctgtccccgcagcgtccgaatggttcggcgttgttgcgtcgtgcgattccctgtccgaaaacaatccgggccggattcgtccgccggggtcgaaggccggagccatccggcccggctttcggtatggaccgcctttcgtttttttattttttcatagcatggaaatattcataatcctcctgctgatcctgctcaacggtctgttcgccatgtcggagatcgccctgatctcggctcgcaaatcgaacctcacggcgcaggccaagcagggcaacaaacgggctcgccaggccctcaagctggcggaagatcccaacaaatttctttcgaccgtccagatcggtattactctgatcggtattttgaccggtatttattcgggggcggccatcgccgacgacctgcgggaagtcttcgtccgctggggagttccctatgcggctcccgtagcgcagacgctcatcgtgatcgtggtgacctatctgactatcgtgttcggagagttgattcccaagcgtatcggtatgacggccgccgagccggtcgccaaactcgtggccggccctatgaaggtgctgtcggtcgtcgcctcccctttcgtatggctcctttcgaagagcatcgagggcatttcccgtctgttcgggctgcgcgataccgacagtcccgtaacggaggccgagatcaagtcgatcgtgcaggaaggcgccgaggacggagctgtgcaggctgtcgagcagaagatcgtcggccgtgtcttctcgttgggtgaccgcagcgtggagtcgatcatgacccaccgcagcgacatcgcatggctcgatgtgaatatgtctgtggatgagatccgcgacctcgttcgtcgggagcctcacggacgctatcccgtcggtgaaggatcgctcgaccggctggtcggcgtcgtctatctgaaggatcttttctcgcatatcggggaccctggattctcgctgcggcagattctctctcctgtcaagctgttccacgagggagcggaggtgtatatggcgctggaacagttgcggaccgagcaactgggttatggcatcgtttgcgacgagttcggcgtcacgcagggtatcgtgactctgaaagatattttcgaagcccttgtgggcgagctgctcgaagatcgtgaagagccggatatcgtcgtgcgcgaggacggcagcgtgctggtggacggacagtgttcgttttacgattttctggcccatttcggattggaggatgtctattcttcggccgaatacaatacgatcagcggtttgattctggatgagttggaacatattccgcacagcggggaataccttcaatgggagtgtttccggctcgaagtcgtggatatggacggagcacgcatagacaaggtgctggcgacgatgatcgacacgtccgataataaaaataaatagggcctttccgtgcggaatttgtttttgatgccatgaagattgccgacatagaattgggtgaccgcccgctgttcctggctccgatggaggatgtgaccgatccttcgttccgctatatgtgcaagcagttcggtgccgacgtggtatataccgagtttatctcttcggacggattgatccgcgatgcgggcaagtcgcttgccaaattgcgcatcgccgaatccgaacggcccgtgggtatccagctttacggtcatctggtggaaccgatggtcgaggcggctcggatcgccgaggcggccgatcccgatatcatcgatatcaacttcggttgtccggtgaagaagatcgccggtcggggcgccggatcgggtatgatgcgcgatgtccccctgatggtcgagatgacccgccgcatcgtcgaagccgtgaagaaacccgtgacggtcaaaacccgtctgggatgggatgaagagtcgaagaacatcgaagagatcgctctgcgcctgcaggacgtgggtatcgccgcactgacgatccacggccgcacgcgggcccaaatgtatcgcggcgaagcggattggacgctcatcggcaaggtgaagaacaatccggcgatccggattccgatcatcggtaacggagatatcgactccggtcccaaggcccgcgaaatgttcgaccgctacggagtggacggggtgatgatcgggcgggcgacctacgggcggccctggatcttccgcgaagtgaaacactttcttgaaaccggcgaggtgatgccgcagccgtcggtggcggagcgggtcgaaatcgctaaagaacatctggccaaatccttggagatcaaaggtgaccgggttggaatcctggagatgcgccgccacctgtcgaactatttcaaggggcttcccaatttcaaggaaacccgcctgaagctggtgactctgttcgatccgaacgaactgtatgccacgctcgattcgatcgccgatcgttggggcgatttcgacgtgagcggggtcatccctgctccgctttcgcatgatgtgtagcttagttccgcacgagaatcgcttgcctgtcgattcctaagcgtatattttcaacaagggcgaccaaatctttctgcccgcccgaaaagtcccggcagcgtaccggtgccgaatttcgtggagccggaaaattgtcgcttcgtgcgtaaggatctccttttattcgttattcgattccccgtcatttgtttattcgataactctgtaaaaacgaagcgccgcgagagaagtcgcggcactttttattatcaacgtccggggttatttcaggctgcgttggatatagtcggtgtaatccttgactacgggcgtgtaatcttcctcttcgaacagcggggaggagatcaggaagtcggccgttgagcggtttacagccgtgggtacgttgtaaagcgtcgccaggcgcaacagcgctttcacatccacgtcgtgcggttgcgccgacatggggtcccagaagaaaatcagggcactgatccgttcgtccgcgatcagggcgcccagttgctggtcgccgcccagaggacccgatttcagccgcgtgatgtcgagtgccggttgctcgtagtggtgggatgccgagtgattgagcagggtttcttcgacgatcttgcctgtcgtacccgtacagacgatccggtgtttgctcaatttttcacagttccagtccacccattccgccaggtcgtgtttcatgttgtcgtgcgcgacgagcgccatcattttctgtctgttcatttctttcatccgtttttttgaaagccgcgtttcggctttcggttgttttatactcgatttacggccccaagatgcgaataagccgagtacaaaagcaaatttatttgcattttgccgaggcgaagtatttaagacgaagtcaaagatacgaaaaggagggagcaatcgtgcgggtttgtacgcaagaattgccgaaccgcttcctattttctgcaaagataatatgcagcggcatcttccgaccactcccggcgcaggtttcatcgaattgtaatgtcgggaaagttcggtattccgcccggaaaccgttacccgttgttgcttgccttgagccctcggatcaccgccgaagtgaatccggcgtgttccatttcgttcagccctttgatcgtgattcctccggctgtggttaccctatccacctcctgttcggggtgcgagccgttggattcgagcaaggcgatcgccccgcgcagggtttgcagaacgccttccctggctttttgcgggtaaaggcccagctctaccccgccctccatcgctgcccggatataacggaaggcgaaggcgataccgcaggagcagagcgtcgtggccggaccgagtagccgctcttccaccaattccgctttgcctaatgcaccgaaaatattcaaaaccagtctgttctgatcttcggtcgcattcagccccgtgatgaaagtcatgctttgctttacttcgatggccgtattgggaattgcgcaataaagggctctgtcttttcctgcccatgtttgcagctgttccaggaaaatgcccgccgctaccgaaatgacgatctgtccatcgggccgcttccctgtcagatgctcttttatcagtgcctccactatccagggtttcacggcgattaccacgatgtaggccgtagccagagagctgtagtcgcccgtaacggcctgcaattccggattgaactcctgtatttcggcggttttgctcgcgcggcggttgatgaccgtaatgtcctgtggtcggaacaggtcgcaggtggatagtccgcgagcgattgctccgcccatattacctcctccgacgatcgatattttcatgggtcgcatggttttttatttataaaaatgctccgtccggcaggtgcggaatcggagctgtattgtctattcgggcaaaggttcggcagcggtgcatacctgtcgaaagggagcaccggcgaatctttatgcttcctgctctgcgggcagtttgaattcggtgaacccggcacccacgagggtattgaaccaggagaaaaccttcttcatgtccgatacgtggacccggtcgcggtcgtattcgggcaatacttctgcgaaatatgctttgagtttttccggagcctccttgtggctgatggctggctgtccctgcgtatgttcgtaaattttggtgaaaacctctgcgagcgggatgtcctcgccctcggtgaagatggatatttcggtcagtgcgctcactttggagttgcttgcggcattcatgcgtttgccgtccgacaacgactcgacgatgacgccgcgcgacgattgtgcgacgtatttgtacaaaccgggttggccggaaatggccagaatctctttcaattccataattttttctgttcgataatatgtttgagtttggttcttcactgtccgtgcgggccgtgcggggtgaatccgctccggctcgtaccgttcgaaaatgcggtttcagatggcatatacgctgtattgctgggcttcggttacggaagaaaggccgttctcgttggtcacgacgatcagccaatataccgtactgccggctttctgtgcaggaatgattgcttcgtaaaagaccgtgtcggaagtcgccttgaaatagtaggcattggtcgatttctgctccgtgtgctctactccgttcttatcggtccatttgacgtcgtatttcacctgagcgtagaatgcaccgtactggttcgatatattggcctgcacataaactttctgaaccgaagatacccggcctccgtcttcgatggtggctccttcgtccgtgatgaccgggaacgtcgtttgttcgggtcctacttctttcagttcgcacgaaggaatcgcgcaggcgatgaaaatcagaaataaaaaccactttttcataatggatgcggattggctgtgtgtggttactctttggtcaggtgaacgtccatctgcgggaacgggaagttgattcccttttcaggtaatgttttgtaatacagctcgttcattgcgaagaaaacgtcccagtaatcttcgtttttcgtccaggcccgaacggtcagattgaccgaattatcggccagggcagcgatatataccgcaggcgccggatcctgaagcacccgtgcgtctttggacagcagttccaggatagcctcccgtgccgttgcgaaatcgtcgccgtaagagatgccgatcacccactccacgcgacgtgtttcggaggtggaatagttgttgatgatcgcggtagcgatcgagctgttcgggatatagatggtctgcttgtcggctgtggtgatcttggtcgagaagagcatgatctcctgcacggtacccgactgtccctgggccgagatgtaatcgcctatgcggtagggcttgagcagcaggatcatcacgccaccggcgaaattctgcaatgtgccgctcagggccataccgatagccagaccggccgaagcgagcagcgcgacgatcgaagtggtgttgatacccatgacttgaatgatcaggagaatcagcacgatgtaggagatggtcttgatcaggttgcgcaggaagatttgcagcgaacgatccaccttgcgcttttcgaaagccgtcgaaagcagttttatgaggcggccgataagccaacgccccgccatgtatatcgccagggcgaggacgattttcaggccgacccagatactttccgaaaccagattcgtcaggactttttccaaatccatattagcgattttttcgaccgtttccgcgaatttggctttttgtatgctgtccggaacgatgagtttttcggtttgctgtgctgtgatgaaaagaaatcccatgaaagaattaaatttgataggttgagttgcaaatttaatcaaaaaaaccggaaataatagtaactttgctctataatgtgtttaacggattttgctatggaaagtaagatagagataatccaaatcaatatttcgggcgaagacaagcccggcatgacctcttcgctgaccgatattctggcccggtacgacgcgttcatcctcgatatcggccaggcgaatatccaccagtcgctgactttgggcatcctgttcatgaccacctccgacaaatcgggcgccatcctcaaggagttgcttttcaaggcctcggaactgggcgtgatgatccgcttcacccccatcaccgaggaacattaccaggcctgggtcggtcgtcagggcaagaaccgctatattatcactcttttgggacgtcaggttacggcgcgccatatcgcaggggtcaccaaagcggtcgccgaacagggactcaacatcgacgcgatcaagcgacttacgggccgtatgccgctcgaggaggagaaccgtgccacccgcgcctgcatcgagctttcggtgcgcggtacgctcggcgataaggccgtattgcagaaacgcttcatggagctgtccaacgagggggtcgatatttcgttccagaaggacgacatcttccgccgcagccgacgcctgatctgtttcgatatggattccacgctgatcgaaaccgaggtgatcgacgagttggccgaccgtgccggcgtgggtcccgaagtgcgggccgttaccgagagcgccatgcggggcgagatcgactttaccgagagtttcacgcgccgcatcgccctgcttcggggactcgacgtttcggtgatggaggagatcgcccgcaacctgccgatcaccgaggggttggagcgcctgatgaccattctcaagcgtgtgggatacaagacggccattctgtccggaggtttcacttatttcggcaactacctgaaacagaaatacggcttcgattacgtttatgccaatgagctggaggtcgaggagggccgtttgacgggccgtcacgtcggcgagatcgtggacggccgccgcaaggccgagctgctgcgtctgctgtgtcaggttgaaaatatcaacatcgctcagtcgatcgccgtcggcgacggagccaatgaccttccgatgctcgacctggccgggttgggcatcgcgttccacgccaagcccaaggtgaaagctacggccagccagtcgatatcgacgatcggtctggacggcgtactctatttcctcggtctgaaagattcctggatcgaataaaccgcgatgctgcgcctttcccttcttctcttcgccctgctcgccgccggatgttacgacgatgccggggttccggctccgaagaacgatccgcttccggaggcgaacctctccctgccggacctctccgcgcggtgcggggatacgcccgtgcgtatcgtccaggacatcgtagtcgcggggcgggtcactacgtccgacgaagcggggaacttcttccgctcggtcgtgttgcaggaagacggaacgggcgtggagctgatggccggcctggacgacctgtttcgggtctatcctccgggatgccgcatcgcggtgcgtcttcaggggctagctatgtgccgtcgcttcggagtggtgcagatcggtacgatgcctgcggcgggagattatgccgtggaagccatcggtgtccgtgccctgctcgaccggtacgtcgcttgcgaaaccgtcgatgttctccgtcccgttccccggatcgtcgctttcgacgaacttgcgcccgacatgtgcggctgcctggtgcagatcgaggatctgacgccgcttccgtcggaagaggatccgacggattggaaatgggaaggttatcggctgttcgaggaccgggccggaaacaggatcgccacctatacgagcacctatgcccggtatgcggcttcggaaattccgaaggggccggttacgctggtcggcgttttgcagtacggcaatgccgggtcgatcggaaaatcctatatgattaaaatgcgcgatgagaacgattgttttcggtagcctgctgctcttcgtgctgcaagcctgcggcaatgcttcgtcgccggagtacgaatccggggacgggactgcgcggcatgtttctattgcgtatctgaaatcgctgtgccggggcgttttgcatcccgttaccgaggatctgtggatcgaaggctgtgtcgtgggcaacgatctgtacggcgaatttcccgatgcgctcgtcgtggaggacgaaagcggcggaatcgaagtattgatcgacgcgaagcgtctctatcggactttcgactctggaagtacggtgcgcgtttattgcaatgggctggcgctgggtgattacgggggcaaggtacagttggggcttccgcccaccgcagaatatattctggaccgtatttcggcagagtcgctcggacgtcatgttcgccgcatcggggacgggtcggtcgatttcgtgcctcgggaactctccttcggggaggtggctgcaagccgtatcgccacttacgtacgattccgcagggtccggttcgcgcacgaagaggtcggtctgcccttctgcctgcgggattcggaaaccggccgattgctggctaccgaccgccatttggtcgatgagcggaacgatacgctgatcgtccgattcgcagcttcctgcacgtatgccgaggagccggccccggctggaatgggaacggtcagcggtgtgctcgactatttcaacggcaattatatgttgcgaattaccaatcgtctgatggaattcccttgatttccgcgtttcgatgcgagggtttgcgacgcacccgatagagtttatgcctaaattgttgctcatactccgtttttatcgctcggcgatgctgtttttctgcggggccgtgagcgtggcgttggcctggctcgtgaccggatacggtccgtcggtcgtgccgttgtgccttgcggggaaaatggtcatctatccggtctatctgtatgtttggatcataccgcgttataacgatgagttcgactattaccgcaatctgggggttcgacgacgtatgctgttgggtgcgagttgcggcatagacttgctggcgtgttatatgctgctgatattcgtatcccttgtactgtatgaacccctctgaaaaacatattcttgaaatagattcggtcgagttgtcgttcggtgatcgggtgattctttcgagtgtatatcttgccgtcgaaaccggcggagcaacggcattgctgggacgcaatggcagtggaaaaagctgcctgatgaagatactctgcggagcgttgcgccccggattccgatcgatgcgcatcgacggcaaatggtacgatcgtttcggaagcagccaggtgcgttatcttccgcagcaggggtttacccccgggtggctgactgtggaggcggttttgcgggacttcggtctggagtgggatgacctgacggtctggtttccgatattcgggaagttgcggaaggcgaaaatccgaaccctttccggcggggagcggcgtattttggagtgtttcgttattctgcgcagccggagccttttcgcagtgctcgacgaacctttttcacaagtcgcgccattgcatgttgtaactttgaaagctttgattcgggcggaaaaacgaaataaaggcatcctgcttaccgatcacatgtatcgccatgtaaccgacgtggcggaccggctctatgtgttggcaaacggacagacctatctgacacaggatgccgaagaccttgtgcgttacggttatttgaaccatttgtagtattgacaggaaggttttctgccgccggagttttcgataaaccggccttgtttccggttttcaactgcattttgaagggattctgcttcggacgtgtccaaataaatttggcactcctcccggcttgcactatctttgcagcggtaaattccggttcggaaaaggtcgtgtcgcgtatcgccgctgccggccgaaaatttccgcaccttaaataacaagacttatggcaggatcgaactttgtagattacgtgaaaatattcgcccgttccggacatggcggcagcgggtcggcgcatttccgtcgcgagaaattcgtcgaattcggcggaccggacggcggcgacggcggtcgcggaggacatatcatcctgcgcggcgacagccagtattggacgctgatccaccttaagtaccagcgtcaccagttcgcggaggacggcgaaggcggttccggagcccgctcctcgggtaagaacggtaaggacatcgtcattcccgtaccgttgggaacggtcgccagacgggtgcttgaggacggtacgacggaatatgccggagaggtgaccgccgacggcgaagagctcgtcctgctcaagggcggccggggcggactgggaaactggcatttcaagacctcgaccaaccaggctccgcgttacgcgcagcctggcgaggatcgtcaggagggaactttcattctcgaactgaaggtgttggctgacgtgggattggtggggttcccgaacgcgggcaaaagcacgctcctttcggtcgtttccgctgcaaagcccaagatcgccaactatgccttcacgacgctcgaacccaacctgggtatcgtcgagtgccgcgatcaccattcgttcgtcatggccgatataccgggcatcatcgaaggagctcacgaaggcaagggattgggaacccgtttcctgcgccatatcgaacgcaattcggtgctcctctttatgattcctgccgacagcgacgacatccgcaaggattacgcggtcctgttgggcgaattgacccagtataatccggaattgctcgacaaggagcgcctgctggccatcaccaaatgcgatatgctcgacgaggacctgatcgaagagatgaaaagccatctgcccgagggggttccttcggtcttcatttcctcgatatcgggtatgaacattccccggctcaaggatatgctctgggaggcgttgcaaaaataagataaagtataaaagcccgcttgggggacatataattatacaaaagcctcgtattccgaaaagaatacgaggctttgtctttcggtccgaaacgacggggaccagagtgtcggaagcgcggctatcgccggattttccgactgtatcgtttgcggggtcggctttacagggccagcggttcgtatttcagtccccaggcatccgctacttgtttgtaaacgacctttccttcgacgacgttcaatcctaactccagttcgtgattctccttgcaggcgcgacgccaacccttgtccgccagttggatggcgtacggcagcgttgcgttcgtaagtccgagcgtcgaggtgtagggcaccgcaccggggatgttggcgacacagtagtgcagaatgccatcgacgaagtaggtcggctcctcatgggtcgtcggccgcgaggtttcgaagcagccgccctgatcgatggccacatcgaccagaaccgatccaggctccatatccttaagcatgtcgcgcgtcacgagtttcggggctttcgcaccgggaatcagcaccgagccgatcaccaggtcggcggtcttgagctcttcgcggatgttgtattccgacgacataagcgtttttacgttttggggcatcacgtccgtcaggtaggccagacgcttgagggagatgtcgcagatcgtcacgtcggcacccaggccggccgccatacgtgccgccgccgtgcctacgacaccggctccgatcacgaataccttggcgggcttcacgcccggcatgccgcccagcagcttcccttttccgccgtgcggtttttcgaggaagtaacaaccctcctgcgtcgccatacgccctgcgacttccgacatgggaatcagcagaggcagcgaacggtcggatgcttcgacggtttcgtaagcgcagcagatcgcaccactttcgaccattgcccgggtcagcggttcgctgctggcgaagtgaaaataggtgaataccagttgtccttggcggatgagtttgtattcaggctctatcggctccttgaccttgatgatcatttcggctttggcatagacctcttcgatggtaggcagcagttcggcgcctgcggcgacgtagtctttgtccgggaatccgctgtttgcaccggcagtcgcctgcacatacactttatgcccacgtttggtaagctctttggctccggacggggtgagcgaaacccggttttcgttgtttttaatctcttttggaataccgataatcataagtcgagtcgtttttaaatttttcggactcaatttatggaaaatccgttgaattgccaaattatttccgaaaaaatcgaaccgatattaaaatttgtaagatatggaggcgtaaaaggtccggggatacgcatacagataacgggtgtccagcggtcggtaaacatacgtgtctgcggtccggatgcggcgtacacggggagattcgtagccgctgaagagttggtctctgtcgttgagaaggttgcgcaccgagagcatcagagtcagacgcgaggcgttgaaataaaacgatttgaaaagcgtgacattcaacgtaaacgcatccccgagccgttcctggcgggtaaacagttcgaaggctcccggcgattcggccagttgccgggcgatgcgcgacgtgcgtcgtaccagcgacggttcgacgaaccgattcccggtccatgcggcctccgcctgtacgccccagcctttcggaccgtaatagttgagtcccgcgaaacccgtcagttggggcgtgttgccgaccgagcagtcgcccatgtagctcgtggcgttgcggtccaacacctcgttgttcgcgtcggcatagaccgtgacgacgggattgtccgcatagcggtaacgtccggcgctggctgccagcgtgaggttccagcggtatgccagccggatcagggcggtcgcttccgcgccgtaacggagcgttccgatgccggcggccgccatgtcgctgtatgttgcgtagaaatcgtcgtagtagtgccgtacctgcatgccgtccgcagtgcggacgacgaagagcgtagcccgaaagcgcacgttgcgcccggaccaggtgtagttcagttcggccccgtaccgtttctcctcggtgggatcctctaccggtcggttgttgtattcgaggttcaggaaaaggtcgtctccgtcgggtgtccgtgatgaggcgtaaaccgtcatttccagatgatgccgtaccgagaaggagtagcctgccgaggcgcggaacaggtagggcgcgaaatgcagcgcccgcgattttccgaaggatttattgccggcgaaaagctctttttcgtagtgtccccggcggaatacggaggcggctccgacctcggctgcgataaaagcccgcaggcggtcggcacggtattcgagtgaacctccggcgccgatttcattgcgccgcaagtcgtagtcgtagccgaagcgatcgccttcgcggatgatccgatcgggatgacgcagatcgttctggagtttgttgccatagacgccgtcgtcgatcaggtaatagtcgcgatcgacgaaataactgcgccccatcaaatccctcatctgtttgtagaatcgggagtccgtccgggccgcccggatgccgtagcgtaccgtcagtcgttcgctgattcgggtgatgccctccgcgaggagctgcatattggcgatgcgctccacacggtcctccatgagataggtcgcgctgccgtccttgctgtttctgttttgccggtaaaattcgtcccagtcgatttgggtgtagcggacatcgttcgcccgccagatattttccatttcgagccgggttacggggtccgtctggtagccgggcatccagcggtagtagtccggcatcgggctcggagcgtcgtaccatgccagcgaactgtaacgcctgatgcccgtttccgccgtgaaggtcgctgcgagcgaagtcgcatccgtcaggcggatccggtatgcggctgcggccagaggaaccgcttcgcgtcggatgcgcccgctgcgcacttttccgtcctgatagccccacgaagggttgtagaggggatttcccgtcaggtcgaaggcttcccgggtcgatgaggtgcgcaggcttcgcatcgaaaccggtacgacggtcagcaacgagaagagatgcctgtctccgaatcttttggatagaagtatcgctgcattcagcgaattgctgaatacgccgtcggcataaaggtcccgtcccgtgcggccctgtacggtcgccgcaaggtcccagttccggccgaggttttcggcgatggtcaggcggagccccatcaggtagttgcggccggagaattggagtgccgcattgcgctccgggagcagtggctcttcggaggttcggtattcggcgtccagagtcgtcggtaaatgccatccgttcatcggctctccgtacttttggggatacaaggcattcatcgacggaatgtagcgcgacggcagccggatgccgttcagcgacatccggtcgggccggtacggttctccgcggcggttgtaggccacgaatgagaatttgaagtccgtggcgtcccggaacaggtcgcccgtactttggatcgctcggtagaagagcgacgaatcggtgtcgatcatcgggctgtaaggctcttcgtaaccgttctgaaagggataatactcttcgtcccgcagattgtcttccggggtttgggcccggagcgggaaacaaccgatcaggccgatgacaacgaagagtaaatatctcatttgggtcatggtatgatacaaatatacccaaataataaaaaaatcggacgcttgggtccgatttatcttcaattccgtccgagatatggctcccgttttgattccgatcacctctgtatccctggcagaacagcggattccggcgagcgcccctgcgatatggcacgccgcgacctgacgttccataaagaggatgatacgaaggctctaccttcatttcgcatcatagcgatcgagcgaaggccgctttatccggggtgattatacattcggagtgcatcgctgcattcccggcaagacgtttctgtattttggtttatgcttaattctgcagacttcattccatggggtgcaatgcagcagaaatgccgtcgtaggccctggagcggcctgaaacggagtttgataaaagagcgccgacttgttggaaaataacgacgccgtctttcaatgattgcgcagatgggatcctccttcttggccgttcgcttgaaacgaaatatggaaattttttcgaagtccgcttttggaccgatttatataatagactgccgggttacggcttatgtagtgtcagggcctcaaatgagcgatcggcatagaccagaataacgcgcacgacgggattccggtcattgccggcgagggtttgaagaaccgtatcggtttgcttcgacagctcgttgtcgttctcggccgtttgtgtcgatggagcgaccgaaccggcggtgttcgatctctgttccagttccgtcccgaacagtccggtgtcagtccgaccatttccagcgtctgttccgttcgttgaagaggaacttttcggattgccggttcgatacatctgttcggagtcgagcagcaaccagtccggattgacgcgcggaaacctccggagaatcttctgcagcaaatcgaatcccggtttgttccgtccggcgagaatgtgggagattcccgaaggctggattccgaggatctcggccatccggctggaggttaaaccttcgcttttcatcaattgttgcaatttctccttcatttccggtattttttacaaaaataaatatttttcttttgtaaaacaactattttgtacgattgtaaaatgttaattgttgtcgataatgtttacaaatgtaattattcgaatatggttaaatatcttcgaatcttgtgtgtgaattatttgtatatataattttatgtaatttattgattataagtatataatgcttttatatttttatgaaattcgatgtggactgcaaaacggctctaaatacggttggattcttcttgtttttatttagttagttgtcataaatatatggtttatagtatatttatattgataattcaatattttgattctaataatgcaggggatttttgactgttgcgagggtttgcttagtattttacatttgttgaatatcaacagcatgtttacagagtgtgtatttacaaatggataaaattaggcaagtttaagaagaaagatgtgattacatttgtaacatactaccctattttgctggattttgcaataatttcgggatattgaaattcgctctccgtcgtttttttaacattattttccttttgattatattatgttaaaaaataaggccggatagtgtaatcaatacactacccggctggtaattaatggtttgtatgttctgccgtatgtcctattcccgaatcattctggctgtttcttcgaactcttccggagtgaatttgggcttgactttgcggaaatcaacgtcgtattcgttttccatcgggatcaggtgaatgtgcgcatggggaacttcgaggccgaaaaccactactgccactcttttgcaagcgattttcgcctggatttttttcgccacccttttggcgaagacgatcatcccttgcagggtttcgtcgtccaggtcgaaaatataatcgatctctttcttggggacgaccagcgtatgacctttctcgaggggattgatgtcgaggaatgccagaaaattttcatcctccgccaccttgtagctcgggatttcgccgttgatgatgcgagtgaatatggatgccatatgaaaatatgtttattgattgcgtcgttgcttgttgtggcttatcgcctctttgaggtcccgtaataagcgaagggagttttaatttaattcggagagaagaatccttctcatccttctattttgcatcgtgtcggcttccgaaaaatacgggaatcgatgccgatgagcgtatgtgcctgtctttggctactcctccttgaattttggagccattatctccgaataaaggaccgcttttcgcacatcgaattcttcggcgataccggggctatgaggttgctgttcggcgtccgctcgggatatgccgatctggttgcgtaacggagattccgctttttcagtttttggggacttgccggccgtttttcggaatccggacaccgggtcggatgtgtccgcgtccgcctgacggacggaccgtgtcgccgatgcggagcgcaactcttttctttgcatctccttgaacttcttgaccagtgggacgatcgtgactatgacgatcaacagtgcgctccacagtatttggatgatatctttgtccatagtgccgatggtttaatcctgattgcgttttacggtgtctatgccctttatcttgcggattttgtccatgattgcatgcaggccctccgcatccttgacataaaggctgatcgtgccctcgaaaatgttgtcgtgcgtctggatattgatctgccggatattgatgctgaaatcctcgctgaccgtttttgccaggtcgagcagtatgccggtgcggtcgataccgcgcagttcgatggtcgataggtacgacatggccttgtgttgcgaccacttgatctcgtccttgaggatattgcgtccgaattgagcggccagtcggtcgagctccttgcaatcggatttatgtacgatgatacggttcgacgcagggtctttataccctactacgctgtcccccggaattggtttgcaacattcggccatgacgaattgcggttcgcttgccgttgccgattcttcggctttcgccttgttcggttccggattttcggcatcgtcgccctcctcgtcctcctttttgttgataaaaagcgtccagaatttgagtatcttgctggtggcattgactttcaggaccttgtccaggtctttcagatcgacgatccccgccccgattttgctgtaaagctcctctttgttgttggattcgtaaatcgggacgattttgcgcagcacacgaccgctgagcggggtattgagttgctgcattcgctcctcgagcatcttcatgccccgttcgatgttgttttgccgctcgcgtttgagaaaactcttgatcgcttgcttagctttggtcgtggtgacgatatcgagccattcggctttggggcgtgcgttgtcggcggtgatgatttcgatctggtcgccgctgttgatctgcgtggtgatcggttcgatcttgtggttgatcttggcgccgatggcgctgttgccgattttcgagtgtatgtcgtacgcgaagtccagcgcagtggctccgtacggcatttttcgagcttctcctttgggtgtaaatactgctatttcagatgtgtatagcgataatttgaagttatccaggaaatcgacggcgttttccgtcggaccattcagtgcatcgcgtatctttttgagccagcggtcgagttcgtcctcgttgttcgacagcgaggcgtttttgtatttccaatgagcggcgaatcccctttcggcgatctcctccatgcgttgcgtacggatctgcacctctacccatactccgtcgggacccataactgtcgagtgcaacgcttcgtaaccgttggccttgggcatcgaaatccagtcgcgcaggcgatccggtttcggcgtgtagatgtcggtgatagtcgagaatatctgccagcactgtgtcttttccgaggggaacggcagcggctggaagacgatccggatggcaaacaggtcgtaaacctcctcgaaggggatctgtttgcgctgcatcttgctccagatcgagtaaaggcttttgacgcgtcccgaaatttcgaagttgatatggtcccgcttgagcgcctcgatgatcggggcgttgaatttgctgatgaaggcttcgcgctgttcttcggtcgctttgagtttttccgacagctcggcatactgtaccgggaagcgatatttcatgcagaggtcttcgagttcgctcttgatggcgtacaggccgagtcgatacgccagcggtgcgaacaggtaaagcgtttcacccgtgattttgatctgcttgttggtaggcatcgaccccagcgtacgcatgttgtgcaggcggtcggcgattttgatcaggatcacccgcacgtcgtccgaaagcgtgagcaggactttgcggaaatactccgcctgctccgaagtatcggcattgaatacgcccgacatcttcgtaagcccatcgaccatcttggcgatcttgggcccgaagatgcgctccatatcttcgaccgtgtactccgtatcctccacaacgtcgtgcagcagggcggcgacgaccgatttgacgccgagcccgatctcgtccacgacgatcttggctacggcgatgggatgcagcaggtacggctcgcccgagcggcgacgcactccgccatgcgcctctttcgccaggaaaaaagcgcgtttgatgaactcccagtcttcgtcgtttttacagattttggtgcacgactgaagcagttcctcccacttctccttaattaatcgttcgtcttccggcgtaaaatccataccatccaatgctgttttagggtccaattacgaatttcgacggatctcgtaccgacgatctcgttttctatcgtaaaatatcgtttttcgcttcgtttccgggggccgttttataactgtcccggctataccgtgcgtcgctgcctgtatttgtccgaagagagaagactccgaccggtcttttgggcgtttcctgcctttgttacaggccccggtcggctcttcattcgctttttatgctttgcgggcggcaatcatcgcttcgcggactttggcttcgacttcgttgcggagcgcttcatcgttcttgagaagctctttcacgctgtcgcggccctggccgattttgcggtcgccgtaagagaaccacgaacccgatttcttgatgattccgtagtccacacccaggtcgatgatttcgccgatcttcgagatgccctcgccgaacatgatgtcgaattcggccttcttgaacgggggcgccaccttgtttttgaccactttgacgcgggtgcgggtgccgagctgttcctcgccgtccttgatgaccgacacccggcggatgtcgatgcggacgctggcatagaatttcagtgcattaccgcccgtcgtggtttcggggttgccgtacactacgccgatcttgtcgcgcaactggttgatgaagatgcagaccgttttggttttggagatgctcgaggtgagcttgcgcagtgcctgcgacatcaggcgggcctgcaatcccatcttggcatcgcccatctccccttcgatttccgccttgggcgtcagagccgccacggagtcgatgacgatgatgtcgatggcgctcgagcggatcagcgagtcggcgatttcgagcgcctgttcgccgttgtccggctgcgaaatcagcaggttatcgacatccacgccgagttgctgggcgtaggagctgtcgaaagcgtgttccgcgtcgatgaaagcggcgataccgccggccttctgggcttcggcgatggcgtggatcgccagggtcgtcttgcccgaggattcgggaccgtaaatctcgatgacgcgtcctttggggtaaccgcctacgccgagcgccatgtccagggtgatcgaacccgtggggattacctgtacgtcggcgacctctgcgctcgacatgcgcatgatcgagcctttgccgaaatccttctcgatcttctccatcaccgcgttaagtacctttaacttgtcgggatttgcttgtgttttctctgccatatagtcgaattgtttttattttttcgtatttcgtatccggtgtccggtgcgtaaacccgggattttcccgcctgccgaactttgctgttctgtcgtcgctgcccggcgaccgacggatcttccgacactgttcctgaaagtcggaatcgccgtttcgctccgggtgttttacacaacgggatttatttttcaaagttacgaaataaaatgcaattatcgccatttccggccggatttatggctgtttgcggatgtaattctgtgggtgaaggggaaatttgcggctgcgtgtcggggtgggtcgtattttggggaaacagggtcgttcgttgccgacggcctgaagaatccgggattttcggaggcggaggatatggtcggcgaatcgactgcctccggtgtggttcaatgtccgggtgcaaccggattggagaagtgtatgcgtgccggtgtcggggatggttttgtccggagtgacaacaagcggaaggcgacggagtttgcgggcttgtatggcatcggaaatatcgagtcgtcggtaagtttttcgcaaatttgtgattcgggaggagatgaaaaaagtcccggcgggttatgccaggaccagtttttcgagctcttccatctgtcgctgaaaagccttgtccgtttcgatctggttcgataccgccttgcaggagtgcaacaccgtggcgtggttgcgtcctccgatagccgaaccgatggcgatcagcggggatttggtgtgctgcttggccaggtacatggcgatctgacgcgcctgagccacttcgcgggttcgttcgggcgaattgaggcgctggatgtcgatatgcaggaagtcgcagacgacttcgatgatgtgctcgattgtgatctctttttggcatacccggacatagaccttcagaatctccttgacgagcgacagggaaactttcttgcccatatagacggtattggctaccagggccgacagagcgccctcgatttcccggacgttggcggagatattgtccgccaggtagcggacgatttcgtccgtaagctggaggccgagtttctgagccttgattctgatgatcttgactttggtgtcgtagtcgggcgtgttgagctgggtcgaaagtccccacttgaagcgggtcagcagtcgctgttcgatgtccttcagctccacgggcggtttatccgaggtaaggatcaactgtttgcctgccagttgcaagtggttgaatatgttgaagaaggcgttctgggtgccggtttttcccgtgagctcctggatgtcgtcgataatcaatacgtcgatcatctggtagaaatggatgaaatccggaatttcgccgttcttgtaggcggtctggaattgcgcctggaacttgttcatcgagacgtaaagcacctgcagttcggggtggcgctgccgcacttcgtggccgatcgactgcacgatgtgggtcttgcccagtccggagttaccgtatatatacagcgggttgaaaggcgtatggcccggatcgaccgcgacggccatacccgccgaacgggccaggcggttgcactccccttcgatgaaggttgcgaacgtgtagttcgggttgagctgcgggtcgatgacgatcttcttgagacccggaatgacgaacggattttttatatttgccgtgttggtctgggtgctgaactgcgaaatcgccgtcgtatcggcttctttcgacactggcacgctctgtgcgtcgtttttgggaacggcgtagtgcaggcggatctcctgtccgtagagctgggagatgatcggccgcaggaacggaatgtagtgcttctcgatctgatagacgtagctcatgttgggcacgcacagacgaagcgtcttgccgtcgaattcgagcggcacgatgggtttgaaccacttcacgaactcctcttcggtcgttcgggacttgatctggtccaaacaagtttgccatttttcgcaatatgtctgtgcgggagctaacatcgatggagggtgtatccgttttttttggtagcacaaagttgtaaataaatttgtgaaaatggagcggcaaaatgcttgcaaaagtcgatacttttactatagaaaaaaggatgtggcaggctcctcttttttaacttgctgatagtgaatattggaaataaaatatgtatatttgcgtataaaatttttggaggataacagctttaagctataaataaaaccaatgtagttatggaaaacggattagaacaacaagtgctggcgaaagcccaaaaatggctcgacggcaattatgatgcagagactaaaaaacaggttaaatacctgatggataatgatatgaaagaacttgtagagagtttttacaaggacctcgagttcggtacgggcggtcttcgcggggtcatgggagtgggcaccaatcgtatgaatatctatacggtaggtgctgcgacgcagggtctttcgaactacctgaagcgcaatttcgcgggcgaggaaatccgggtcgtcgtagggcacgacagccgcaacaattcgcggatgttcgccgagcgtgtggccgacatcttcgcctcgaacggattcaccgtatttctgttcgacgcgctgcgtccgacacccgagttgagcttcgcgatccgggagctgaaatgtcagtcgggcgtggtcgtcacggcttcgcacaaccccaaagaatacaacggctacaaagcctactggtccgatggatcgcaggttacggcaccgcacgacaagaacatcatcgacgaggtggagaaaatcaccgaggtcgatcaggtgcttaccggccggaacccgcagaacattcatgctctgggcaaggatttcgacgagttataccttaataaaatatacgagttgtcgctttcgtccgagagcgtgaaacgtttccacgacatgaagatcgtctattcgcccatgcacggtgccggcgtgcggctggttcccgagtcgctcaagcgcttcggctttaccaacgtgcaaatggttcccgagcaggcggtgatcgacggtaatttcccgacggtggaatctcccaatccggaggagcgcaagacgatgtcgatggctatcgacctggcgaagaaggtgaaggcggatctggtgttggctaccgatcccgattcggaccgtatcggcgtggcgctgcctgatgaaaacggcgaatacgtgctgttgaacggcaaccagacattggtgctgctgatgacttatcaactgacccgctgggccgagttgggccgcctgaacggacaccagtacgtgatcaaaacgatcgttacgaccgaaatggtggatgccgtagccgactatttcaaggtgaaatgctacgagtgtctcaccggcttcaaatacatcgccaagatcattcgggggcacgaaggtaccgatatgcagtacatcggcggcggcgaggagagcttcggctacctggccggggactacgtccgcgacaaggacggcgtgtcggcctgctcgctggcggccgaggccgcagcctgggtgcgcgatacgatgggtatctcgctgtacgagtggctcaagcagctttatgtcaagtacggattttaccaggaaggcctcgtttcggtagtccgtaccggtaaggagggtgccgaattgatccagcggatgatggtcgattaccgtgccaatcctccgaaagagattctcggctcgctcgtggtgaagatcaacgatattcagactttggagtcgttcgatgtccgcaccggaaagaagacgcatctggagcaggataagagcaacgtacttcagtggtataccgaggacggcacccgtgtctgtgtccgtccgtcgggtacggagcccaagatcaagttctacttcggggtgaaggctaccctgccgtccgtcgccgattacgaaaaggtacgggccgaactgaacgacaagatcgaacggatcaagaaggagctgaaattggtgtaaaatattcatataattttatggaatgcggatatttcccgattataggttggggattttcactccggaatcaaaaaagagagccttaaaaaggctctcttttcgttaaattcaataattgtaattaccctactacttttcggatgcgttccagcccttcggcgagcgtcttgcgggggcaggcgatgttgatgcgcaggaacccttctccggcgtacatttcgccttcgttgatccatacgtgcccctcctccagtaactgccgggctatttccgtcgtggggcgtttcaacgtccgacaatccacccacaccaggtaggtggcctcgagcggagtgaccggcagagccggcaggtgccgggtgaagaagtcgcgcaggtattcgtagttctcccacaggtattttttcagttcgtccagccattcgccgccttcgttgtaagctgcgatcagggcttcgactgcaaaggcattcagtgcgtggagttcgttatcgacgagttgccggtcgattttccggcgtatctcgggatcggcggcgatgatgttggctgcttgcagaccggcgatgttgaaggtcttgctcggggcggtgcaggtgaccgaatgccgcagaaactcttcgttcagcgaggcgaacggaatgtggcgatggccgtcgagcgtcaggtcgcagtggatttcgtccgatatgaccgttaccccgtgccgcaggcagatctccccgaggcgggtaagctcttcggcggtccaggcccggcccgccgggttgtggggattgcacaggaagatcagcttggcctgcgggtccgccgccttgcgttccagatcttcgaagtccatgcgataggcgccgttctcgttgatgagcggattggcgagcggctgacggccggtacgctccagcacggcgaagaaacagttgtaaacgggcgtctgaaggattaccttgtcgcccggttcggtcagggccttcaggatgaccgaaagggcgggaatgacgcccgtagtcgggaggatccactcgttttcgatgcggaatccgtgccgtttgccgaaccaccctttcacggcttcgaaataggcgtcggggaccttcgtatagccgaaaacgccgtggcggagccgtcgttccagggcgtcgagtacgggcggggccgcgcggaaatccatgtcggctacccacataggcagcacccgttcgtctgtggccagatcccatttgacggagttggtaccccgtcgcggaataatctcatcgaaatcgtatttcataactctaaagtatttgattacaggtaacagttccgtattttatcgcggtatcgccccttgttcgggggattacgggcttttcgtatccgatcccgcttttatcgggcggtttgccggaagatggtttgtcggaagggccgtattttgtcgataatgacttccgtcgtacataacctgccggaacgattcgggaacgtaatcgcccggaatacctatcaggcaattattatgtttttcaatgttccagccatcgtccgacggtcgcttattcacagcctgtgtccgcgtttgtgattctcatcctctcccgaacccccttctcggataagttattatccccgcttttcggggtttcggttcatagcttgggattgttgcggtgccgctccttgtcgcgggccgttttcttggcgaagttggcttcgagggcttcggtgaggtttactcccgtctggttcgccaggcagaccaatacccacagtacgtcggccatttcgtccgccaggttctccttttctcccgctttgaaggattgatcgccgtatttgcgggccatgacgcgggccagctcccccacctcttcggtcaggatggccatgttggtcagttcgctgaaatagcggacaccgtattcgcggatccatgtgtccacccgtttttgtaattcactcaattccatatcggtcgatttttcaaattcgtcgttacagagtcgtttttttcgttgtctgccgactgtttgcttgttaccggagtgcttttcttttcctctccagcccgccccgcctttatcggcagacggctgtcctattttacccggatcagattcaatccgtcccggatcgggacgatcacgttttccacccgctcgtcctcccgtatcatgcggttgaattccagcagcgcctgcgtatggcggtcgttgtgtgctaccggttccacgatcttgcccgaccagaggatgttgtctgcgatcaatatcgatccgctgtgcaccaacactttgcttcctccgtcacccattagcatccggtagtagtctgggtattcgcgcttgtcgccgtcgatgaatacgaggtcgaacgtatatccgagtgtcgggacgatatcgagtgccgaaccgatatgctgacggattttttgtccgtgcgggctgcggcggaaaaacgaggcggcgaactcctccagctcgtcgtccacctccaccgtgtcgagcacgccatcctcttccagcccggcggccatgcagagggccgaataacccgtaaaggtccctatttccaggatgttgcggggccgtagcatccgcacgagcagctccagcagcttgccttggatatgccccgagagcatgcgcggctgtacgacccgcagatgcgtctggcggtcgagttcgtgcagaagttcctcttccggcgacgaaaaatcgtgaatatatcgttcgagtgcgtccataatatataattgtgtgtcgggtcgttgaaaaccgttatttatagatgagccgcgatggtgaggagaagaccgacgaagctacggcggtcaggtcttcggccgtgagagcctgtattttgcgataaacctcctccatcgtatcgacctcgcggtgcgccaggaaactcttgcccgcaccgagcatgtaaccttcgttgctctccatcgagatcgccagctgggcgatgaactgcttcttggccatcgaaagccgtcgggccgagagcggcgtggtttggagccgtcccagctctccctcgatcagctcgatgcagtgatccgtgttgtcgtggtcgcagctgaaatagatggccacgatgccgctgtcgctgtaaggcgtgtaagaggcttcgatgttgtacgaaagcccgtttttctcccgcaccagcacgttcagcagggagttggccgaagggccgccgagcagattgacgagcagcgccagcggcagccgctccgcgtcgttgatcccctgcgcccgagcaccgatgatgcagtgcgtctggtgcgtatgtttggtaacgattcgggagaacggttcgacggcggcgggttgccggcgcgagaaatcccgtgcggaacttttgatgtcgttcaggtagcgggcgacggtcgtttcgacgctcttggccgagaggttcccgatcgacgagaaaaccatctggtcggtggtgtgcgtgcgtgcgacgaactcccggatcgactctccgctgaagcgtgccaggctcgatttccggcctaaaatattgtgtcccagctccgacccggcgaaaagcatctcttcgaacgtatcgtagatcatgtcggccggagagtccttgtaggtattgatttcgtcgtagatgatctccttctctttttccagttcccggtcgggaaaagtcgaatggaaggcgacgtcggcgatcagctccacagccttcgaaaagtcgcttcgcagggtcgtggcgtggatcgtcgtatcctccttggtggtgaaggcgttgagttcgccgccgaggttttcgagccggcagttcacctggtaagccttgcggtgctccgtgcctttgaacagggcgtgttcggtgaaatgggccagtccgaattgattcttcagctcgtcgcggcttccggcgtttaccagcagggcgcagtgcgtgacgttgcctttgatccgacggtgaatgccccggatgccgttgggaagcgtataggtagtaaattccatcgttgtcttattcgtttttctcgcggagcgccaggtagcggcccgtgtaactctccttgcatccggccagcccgtccggagtgccttcgaagacgatgctgccgccccggtcgcccgcttcggggccgagatccacgacccagtcggcgcacttgataacgtccatgttgtgttcgacgatcacgatcgtatggccccgggcgatcagggcgttgaaggcgtcgagcagcttgttgatgtcgtggaaatggagacccgtcgtaggctcgtcgaagatgaacatcacgttgccttcggtgctctccttcgacaggaacgaagcgagcttcacgcgctggctctcgccgcccgagagcgtcgaggaggactgtccgagcctgatataccccaacccgacctcctgcagggggcggagccgttcgatgatccgtttgcaggtggcgtttttcttctcctcgccgaagaaggcgatcgcgtcgtccaccgtcatctccagtatgtcgtagatcgacttttcgcggtagcggacttcgagaatttcatctttgaagcgcttgcctccgcaggcttcgcacactagctccatatcggccatgaactgcatgccgaccttgatgaatccctcgccctggcactcctcgcagcggccgccggcgatgttgaacgagaaatgcgaggggttgaatcccgaccgctgggcgtagggctggtcggcgtagagtttgcggatctcgtcgtaggctttgatataagtcacgggattcgaccgcgaggatttgccgatcgggttctgatcgaccatttcgaccgaacgaagcgtcgaaagatcgccttcgatggcgtcgaaatcgcccggtttgagccctgtgtcgaacagcaggcgccgcaatgcgggatagaggatgcctttggccagcgacgatttgccgctgccgcttacgcccgtgatgcaggtcatcaccccgagcgggatccgcacgtcgatattcttcaggttgttctgccgggcacctttcacggtgatccacgctgccgggctgcgccgcgaggtgggcaccgcgattttgcagcgtcccgtaaggtagtcggccgtcaggctttttttttctttcaataaggctttcagcggtccgctgaagacgacctctccgccgttgtagcccgcctccgggccgatatcgacgatccagtcggcagcacggatcacctcctcttcgtgttcgacgacgatcaccgtgttgccgatgtcacgcagttgttcgagcacaccgaccagacggttcgtgtcgcgcgggtgcaggccgatcgacggctcgtcgagaatatagagcgaacccacgaggttgctgcccagcgaggtcgaaagattgatgcgctggctttcgccgcctgaaagcgtcgaggagaggcggtcgagggtcaggtagcccagccccacgtccatgaggtattgcaggcggttgcgtatctcggtgaggatgcgggcggcggttttcgtgtcgtgagcgtccagctcgagcgaggcgaagaaatcggcgagcgtctccaccggcatcacgaccaggtcggcgatggttttgccgccgattttgacgtaaagggcctctttgcgcaggcgcgagccgccgcagtcgggacagacggttttgcccgtgtagcgggctttcatcacccggaactggatcttgcgccgctcgctgtcgatgtaggcgaagaagtcgttcaagccgtgaaaatactcgttgccgcaccacaggagccgtttctgttcggccgtaagttggtagaacggcgtatggatcggaaaatcgaacttataggcattggctacgagctggtctttccacgcccgcatggtctctccgcgccagcaggccacggcgtcctcgtagatggttttgcgtttgtcgggaatcaccaggtcctcgtcgatgccgatgatcttgccgtaaccttcgcacgtcgggcaggcgcccagcgggttgttgaagctgaacagatgttcggtcggaggctcgaattcgatgccgtcggcctcgaaacgggccgagaactctttgacgccttcgggcgtgacgattcggcaaaccccgtttccataggagaaagcacgggctacggaatcccgcaggcgggtcggcaggtcgccgtcctgcgaaactttggcacgatcgactacgatcgagatatcttcggcacgggtgttttcgtccacgcggggcaggaaatcctcgatcggcagagtctctcccgccgcatgtacacgcaggatgccttcgcccagcaccagggtcagtttttcgatgacgccctgcccttcgcgcagttgcagcggcgctgcgacggccacgcggctgccttcgggcagggagaggatatattgcgccacgtcgtcctcggtgtagcacttgacctcctgtcccgatacgggcgagaaggtgtgtccgatacgggcgtagagaagtttaaggtagtcgtacagttcggtcgtggtgccgaccgtcgaacgcggattgcgggtattgaccttctgttcgatggcgatggccggagcgatacccgtaatgacatccacatcgggcttgttgatcttgcccaggaattgtcgggcataggccgagaggctctccacgtagcggcgctgcccttcggcgaagatcgtgtcgaaggcgagggtcgatttgccggaacccgaaagtcccgtgatgacgaccagtcggttgtgcggaatttcgacctcgatgtttttgaggttgtgcacccgtgcaccttttatataaatggacttttgttcttttgtcatgtttttttacgtggatccggtccctgcgccgtgcgtgttccgggccggaccgatattatttcatttcgagggtcacgcccccgatcttttccagtttgccgatcatacctcctgcgagactttgccggatcgccagtgtcatccggcagaggttgtcgaactgctgcgtcagcacccggggctgttcttccttgaccacgcgcatcacgtcgttcatcgccaggtacgaaaactccacctccacgacggtatcgaccgtccgctccacgatttcggccgctcggatcgcttcggccgccgactccttgtaggcaccgatcaggcccgatactccgagtttcgtaccgccgaaataacgcaccacgacgattaggcagttgaccagttcgttggacagaagctgaccgaggatcggcttgcccgccgtgcccgaaggctctccgtcgtcgttggcgcggaacgtttcgccgtgcggacccagccgccacgcgtaacagtggtgcgtcgcgtcgtaatatttcttgcgcagcgcatcgagcagcgtgcgaatctcctcctcgctttcgaccggataggcataagcgaggaacttgctgcttttctctttgtagatggcttccgcaggcccggcaagcgtatgataactgtccgaggtcacgactacccttgttttatttgactttggtgaacatcctgttccagcggatgttcgcggggaagctcttttcgggatccagcgacagccagatgaaggaggctttgccgacgatgtggtcttcgggaacgaatccccagaagcgggagtccgccgaattgtggcggttgtcgcccatcatccagtaatagttcatccggaaagtataggtgtcggtctgttcgccgttgatgaagatcttcccttcttcgtccacacgcaggtcgttgccttcgtacgtttcgataatccgccggtacaggggcaggttgtcggccgtcagcgcaacggccgttcccgcttggggaatccagatcgggccatagttgtcctgattccacgcatagcggcgatcctgcggaaagacatcgaaattgggactgcgggcgatgtatttctgtacggaagcgacgttgtccagcttctccagttctgcggcgttttcgtcggtgagcgccatgtagtagagcgtgcccttgttgctccattcggtgatacccagattgtcgagtgcgtattgggtgatcggcgaggtggtttccaccagatacatgaactgttttccggcgacgggctcctgcggcttcccattgacgtaaaccgccgtttcctcgattcgtatcgaatcccccgggaggccgatgcagcgtttgatgtagttttcacgcttgtccaccgggcgcgtgatgaccgtgtattcctgcatcagccgttcgcggccggcctgatgtccgaaagtttgctgatattgccgcagtacgtcgtagtacgaaacgtcctgtcgttcgagcagcaccgtatcgcctgccggaaagttgaataccactacgtcgttgcgctcgattcggcccagtcccttgaggcggtgataaggccatttgacgctttcggagaacgattttttggttttcgaaaaaggcatcgtatggtgtacgaacggaaatgccaccggggtattgggcatctggggaccgtaggctaccttgctgacgtagagatagtccccgaccagcagcgatttctccatcgacgacgagggaatcacgtacatctgaaagaagaagatgtgtaccagcgacgctacaacggtggcgaaaatgatcgcattcacccattcgtaaacggctttgtaacttttgcttttcttgcacatctcggcgttgtgccgccagacgtacttgtagaaataacgcgtgatataaaggtcgaagatgacgatttcgcccagcagcagccaccagttgcccgtccagaggacgaaccagaggatgtataaaatacttgccagggtgaatcccacccatttgttgcggaagaaagctttgatttttcccatgttctgtatcgtttatttcagcaggtcgtccatcgtatagacaccctttttgccgcagaggaactccgcagcgacgacggcgcccagagccagtgtccggcggtttttgatcgtatgtttgagttcgatccggtcgtcgtccgattcgtaagttaccgtgtgtgtacccggaaccgctccttcgcgcagggaggtgacgacgatttgcgaaagatcgtcgctgggttcattcacccagcccgtcttccgcccgatttcgctgatgatcccttctgccagcgtgatggccgtgccgctcggagcatcctttttctgtgtgtggtgaatctcttcgatccgtacgtcgtaggcgtcgaagcgctccatcatccgggccagcctgcggttgaggcggaacatcaggttgacgcccaggcagtagttcgaggcgtagaagagcgcaccgcctttttcccggcaatagctgcgcaactcctccagacgatttgtccagcccgtcgtgccgctgacgaccggaatccctgcgtcgatgcacgcccggatgttgccgtaggccgcgtcgggggtcgtgaactccagtgctacgtcgatgccggccaggtgtgcggcatccagttccgatgcgttcgcctcgtcgatgacggcgccgatacggtgtcccctttcgaggagtattttttcgatttcacggcccattttgccgtgtccgatgatcgctgctttcattggctgaaggggattttacggtatattatcgcaaatatagctattcgccgccgaaataaaaaatagtttcaagtttatatggtttgttggcacgaattgaaaataaagtgttaattttgtcgaattaaattcgcgacggatcgaaacttaaacgtcaaaaacaattataaattataagtattatggcaaataatcagaaaatgcgtacggagagcgacctgctcggcagcgtagagttgcctgccgacgtactttacggtgtccagaccctgcggggtatcgagaactttcgaatcagcaaattccatttgaacgagtatcccctcttcatcaagggactcgccattaccaagctgggagctgcggaagccaatcacaagctggggctgctcaccgacgagaagttcaatgcgatcgcacaggcctgccgcgagatcatggacggcaagcaccacgacgcattccccgtggatatgatccagggcggtgccggtacgacgaccaacatgaacgccaacgaagtgatcgccaaccgcgcgttggagatcatgggccatcagtacggcgaataccagtactgctcgcccaacgacgacgtgaactgtgcgcaatcgaccaacgacgcctacccgacggctattcacctgggtatgtacgctacgcatctgaagctggtcgagcacctgaagcaactgatcgaatccttcgaaaagaaggctgcggagttcgccgatgtcctcaagatgggccgcacgcagctcgaagacgccgtgccgatgactttgggccagactttccacggtttcgccagcatcctgcgcgatgagatcgttcacctgaacgaagctgccgaggatttcctgacgatcaatatgggtgctacggcgatcggtacgggtatctgcgccgagccgggctatgccgagctgtgcaccgagaacatcgctcggatcaccggctggaagatccgtttgacgggcgacttggtaggcgctacgtccgatacttcgtgcctggtcggttacgcttccgccatgaagcgtgtcgccgtgaagatgaacaaaatctgcaacgacctgcgcctgctggcttcgggcccccgctgcggtctggccgagttcaacctgccggcccgtcagccgggatcgtcgatcatgccgggtaaggtgaaccccgtgatccccgaggtaatgaaccagatcgcctacaaggtgatcggcaacgagctgtgcgttacgatgagcggcgaggcggcccagatggagctcaacgccatggagccggtgatggcccagtgcgatttcgagtccgccgagttgctgatgaacggcttcgatacgctccgcacgctctgcgtggacggcatcacggccaaccgcgagcgctgtgccgattacgtgaagaacagtatcggcgtggtgacggctctcaacccgatcatcggttacaagaattcgaccaagatcgctaaggaggctctcgctacgggccgcggcgtctatgatctggtgctcgagcacggtattctctcgaaggaggagcttgacacgattctcaagcccgagaatatgattcgtccggtgaaactgaacatcaagccgcgcaaataatcgcgggatagtatagatgcggggtcgaaatcctatcgggtttcgacctcgttttttatggagcggagttggcgttccggattttattatctttgacatagtcttaaataggttgcgtctcggaaaactgggaacaagtgcccgttttctgtcggctttcactatctttgcggaagatgggaggcggttcggcaatctttgcgtgcaagcccgcacgattgctctcacctttcactatctttgcagagtatcatgggttcggattctttttgcgaatggagatccgatcagccgtgattctcggctcgggatcgaaagattcgggacgagccggctgggattcctcccgaaatgcggggactgcctgcaagatgtgataaatggaaaaacgatgcgttattttatcgaattgagatacaacggcggagcctattgcggttggcagcggcagcccgatatgccgtcggtacagcagacgatcgaaggggcaatctctaccctgctccgtgaaccgattctgttgaccggtgccggacgcaccgatacgggagtgaatgcctcctattacgtggcgcatttcgacacttcctctcccgtcgccgatccggaacaggtcgttttcaagctcaaccatatgcttcccggcgatattgccgtaagccgcatcgtgccggtcgcggccgatgctcacgcccgtttcagcgcccgggagcgggagtaccgctactatatcgaaccgcgcaagaatccctttacacgagccgcttcctggcaatattacgtaccgctggacgtggcggcaatgaaccgtgcggccgacgtattgatggagttcgaggatttcacgtcgttcgccaagctcaattccgacaacaagaccaatatctgccatctcaaacgggccgactggacggtcggccgggacggtacgctttgctttacgattcgtgcggaccgctttctgcggaatatggtgcgggctatcgtcggcacgctggtcgatgtgggccggggacgttataccgttgaacagttccgcgacatcgtcgccagccgcgatctttcgcggtcgagcgccggagcacccgcccagggccttttcctgagcgatgtgctctatccgccggaagtattcgtgcgggaaacccggctgcccgctctccgctatttttcatcggtggaaaagtagaggccgccttcgcttcgatccggcagcctgttttcccttatgttcgggtggttttctcttcgattgtttcgttcggccgcttttcttttcattcaatcgccgatcgtcccggggccatgattccttcggtgttatcgattactccttgacgggcgtatgcaaatgaaacggggacgatcctgtgcaggccgtccccgttcgcattgcggtaattttcgatttatacgtggatcgcggcacccagagctacctcggccgcctccataactccttcgttcatggtcgggtgtgcgtggattgtgtgtgcgatctgctgtaccgtcgctcccagcgatttggcgagcgtcggctcggccagcatttcggttacgttcgctcccaccagatgtgctcccagcagcttgtcgttctggtcgaagatcagttttacgaagccgtcgcggtcgcctgcggcggtcgctttgcccgaagcggtgaaggggaagcgtcccactttgtagtcgatacccatctccttgacctgtcgttcggtcataccgaccgaagccacttccggcgaggtgaatacgcacgagggaatcgtcgtgtagtccaccggctcggagtgtaggccgcagatggcattcacgcagcagagcgcttcggccgacgctacgtgcgccagggccggaccgggtacgatgtcgccgatggcgtaaatgcccggtacgttggtgcggtactgtttatcgacgatgactttgtcgcgttcggtcttgatgcccaactcttccaggccgatcccctcgatgttggatttgatgccgacggccgagaggacgatatcggctaccagcgtttccgtgcccttcttgccttccacctcgacgtcgcatttgccttcggcattgactttcaccgatttcacggtggtcgaagtaagtatggtcgctttcagcttgcggaacgagcgttccatggttttggcgacctcttcgtcttcgaggggcatgatctggggcagatactcgacgatggtgaccttcacacccagcgcggcataaaaataagcgaactcgctgccgatggcacccgatcccacgacgatcatcgtttcgggcagtttgggcagtacgagcgcctgcttcgaggagatcacgtgctctccgtcgatgggcatgaacggcatttcgcggggccgtgctccggtggcgaggatgatgtggtcagcttcgtactccgtgccgtccacgtcgatccggccgtttcctttcagttttgcgaagccgttgatcagctccacgttgttctttttgagcaggaacaacacgcctttgttcatcgtttcggccacgccgcgcgagcgggctacgatcttttcgaggttgggccgcacttcgcctgcgaagtcgagtccgtaatgttcggccgacttgcaatagttgtaaacctgggcgctcttgagcagcgctttggtcgggatgcaaccccagttgaggcatacgccgccggcctcggcacgctctacgacagccactttcttacccagttgagcagcgcggatggcggctacgtaaccgcccggaccgctgccgatcacaatgatatcgtatttcatattttttgtatgtatttattgaattactttcagcacttcaccgtggtcggctactacggcgcgtttccacttttcgttatagcccgggaactggatcttgtcgggaatgtcgcgcccgttgccgttgtcgaggaatttacccggttcggtttcgctcttcaggttgccgtcgatgtatttgacgagcaggtaccggtcgagttccgtccagcggtcgaagagttgctgggccatatccaccgaataacgggtaagccgtttctgccgtttcttgggcgagtcgccctctgtggctgcgtcgatctgtttgacctcctccaaacgggtattctcccactcgtcaaccaccttgcggatgtcggccgcgatcagatcgtaacgcagataggcgaagttggttacgcggttgaagagccagaatgccgacgtgggcgaatatttgagcatcgtgccgttgccctcgcggaaacattcgggaacctcggttgccgagcagtagatcggcgtcaggcaggatgtcgctgcgtcgtccaccccgaaccagaggatgcccatgtcgtccggcagccagggccgggcctgtgccacgaaccagaatccggtctgctgggttgctaccgcacgctcgttcaggtaggttacgccgtccacttcgaaatccatcgggcgccagcggtacggcagggcatgtccgcccgcaccgatgtcctgggtcatgtccatcggagttccttcgtagtggtcgcgcatggcgtcgaaaacggtcttgggatcgactttggtgcggggtttcacccagaggggcatccggttggacatgttgtatcccattgcatagtccgtgtattgatccatgtcgtccgctacggtgcggaagaacgcccacacgcgggcgtcgcatccgcgcaccgtgccgaaatcggccggagcgtaggcatcgcagaagctgaactcctcgtccgggccgttgaaatagcccttttcacgggcgaaggagatcacgtcgggagcgtagaggcagttctcgggatcgtcgagcgggaaagtcgtgatgcgcgactggttggcgtgtgccgaaacgtatccgtcgggaatgcggcgggccacccagacgatgcccttgcgggtgttgttaccctcggcgtcgagttcgcagcccttgccgatcagctccatgatccaggcttcgttccggtcggcgatcgagaaggattcgccgctcgaagcgtagccgtaggtgttggccagatccacgatgatccggatcgcttcgcgggcagtcttggcgcgttgcagggtgatgtagataagcgatccgtaatcgatgcggcccgtcgaatcggccagctcctcgcgtccgccgtaggtcgattcggcgatgatgagcgaatgttcgttcatgttgccgatcgtggcgtatgtttgtgccgcttgcggaatttctcccaggtagcggcccgagtcccagtcatagaccgggagcatcgtgccgggtttgtagcgcccggcgaaggttttgtagagtgcgccgtagagctggtgggagtcggcggcgtaggagaccatcaccgagccgtccgaggaggctccccgggtgatgatgaagttggtgcaggcgtctgtcgccttgaatgtcagacagcacagggctgcggcaaacagggttcggaatagttttttcatgcgagaattttttattttgagtgagaacggcgcgtattctttgaacgatgcggttccgtgtttccggaatacggccggtccgggcaaaagttattttcgcaaagatagcataaaccggaaataaaacaaaaccggccgcatccctttttccggaattcaaccggtatcgtaaaaaccgggacgggatgcgtcgggagcatttatgccggatgttgtccggccggttcgttcgtttcggatgcgacgggatgtttttcgacgggaggcgggagcggctgtccgctgtgttcctgccgggggcggattcgggctcccggctcgccctgaggggccgaaagggacattattctccgaaaaatttgaattgaccgcaagttgaggcacataacttgccgtgtatttcgaaaaatgcagaaactatgtgttacagatcgtcttcaattccctttatcctgctcgcgctctctttgctcgcggtttcctgtggttcccgttccggacataccgggcagatgccgccgatggagatcgaaaccgctgtcgccgagtccgattcgctctatacgcggcggagcttcatttcccagatcaacagcgataacgaagtggtggtcgaaccccgtgtgagcgggtttctcgtagcccggcattataaaaaaggtatgcccgtgcgcaagggtcagttgattttcgaaatcgacgacagtgagtattacaccgccctgctttcggctcaagcggctttggagtcgagccgtgcgctggcactcgaagccaagaacaatttcgaccgggcggtgccgctggccaagatcaatgccatcagcggtacgcaactcgaccaatatacggcgcagtacgccgcttcggaggccgacgtgaagtcggcccggcaggctctgcggaatgcccagctcaatctgggctacacgaagatctatgcacagatagacggcattatcgaatcttcgaacggctccgtcggtgattatgtcggtccgggtacgcaaattccgaccctcaccacgattatgaatattgatacggtccaggtccccattgcgattccgatgacgcaattccttcggttggacagcaatcggacgaatatctacgacaacgccgaactgctttcggagatcgtgctttacgaggcggacggtacccgctatccgcttttcggcaagtacgattacacccggacggccgtatcttcggctacggggacgatcgtgctgatcgtccgcttcccgaatccttcctaccggctcaagaccggacagttcgcgcgtgtcgaagccaatatcggggcgaagctgccccgtgtactggtgccgcagcagagtgtcgtgcagactctcgacgtatcgtcggtctgggtaatccggccggacagcacggccgaataccgcaaggttacgccgggcgagacgttcggcggaatgtgggccatcgagtcgggcctggaaccgggagaaacggtcgctgtgaccggtttgcagaaacttcgtcagggaatgcgggtcgttcccgttaaaaaataggcaggtatgggaaaatttttcatcgcgcggcccattttcgccattgcgctggcggcagctatcgtgctgctgggtatcatttctatattcgacctgccgatcgagcagtatcccgacattacgcctcctgtcgtcgaagtttcgacgacctatcccggtgccgatgccgaaaccgtgaacaatgcggtcgccacgcccgtttcgcagagcatcatgggtgtcagcgatatgctctatatgcaggctacgagcgccaacgacgggtcgatgaatctgcaggtgaccttcgatatcggatccgatccgaacatggacgctatttttacgcagaacaatgtttcgacggccctttcgcaacttcccgcgtcggtgacccagcagggcgtcaccacgcgcaagaccatgaccggctttctgatcgtctattcgctcaccagcgacggacgctacaccggcgattttctctccaactacgcctatatcaacatccagaacgaactgttgaagatcgacggcgtaggtaaggtggacattatgggcgccggtgaatacgccatgcgtatctggctgaagcccgacctgttggattactacaagatctcgctcgacgaggtttttgcggctgtcgaagcgcagggcggcatctttccggcgggcaagttcggcggggaacccgctgcgggcgacgtgacttatacctatacggtgaccatgccgccccagatctacgatgcggagcagttcggcgacatcattatctccaccactcccgaaggcgagcaggttcggttgagcgatattgctgacgtggctctcggcagccgccagtacggtgtcgaatcgctcttcaatagcgacccgaccgccctgctcgtcatttatcagcaaccgggcagcaatgccgtcgatgtgggcaattcggtcaaggccgaaatggagcgcctttccaagcgcttccccgatggcattacctatacttcgatggtcgatgccacgaccagtatcgaagccggcgtgaaggatattttcgtcacgctcattatcgctctgattctggtgatcgccatcatcttcctcttcctgcaggactggcgtgcgacgctcatcccgctgctggcgattccggtgtcgatcatcggcgctttcgcgctcttcccgctactcgggttctcgatcaatatcatctcgctgttgggtatggtgctggccatcggcctggtggtcgatgacgcgatcgtggtggtcgaggccgtgcaggtcaatatcgagaaggggctgagtgcgaagcaggcgaccgtcgaagcgatgcacagcgtctcgtcgccgatcgtcgctacgaccgtcgtactgctggccgtgtttattcccgtatcgttcatggggagtatcacgggtctgctgttccagcagttctcgatctcgatcgccgtatcggtctgcatctcttcgttcaatgccctcaccctttcgcctgcgctgtgcgcgttgctgctcaagccgcgcccgaaggtgcagaagggattcttcgccgctttcaaccgctggttcggcaaacgtaccgaagaatacacatcggctaccacccgttttatcggtcacctgaagcgtaccggaggaatcgtcgccgtaacccttgccgctatcgccgtgatctggcacttcctgccttcgggcttcctgcccgacgaggatcaggggtatgtcatggtcttcgtgcagacgcccgaggcttcatccctgcaaaccaccgtcaaggcgatgcagcgggtcgatgaactcgtccggcagcgtccggatgtcgaggcgacctcctttgccgccggtttcaatatgctggcgggtatcgcttcgagcaacagcggtattatcttcgtgaagctggtcgattacagccagcgcagcaagacctcttctcagatcgcttccgccttgacggaggagttgtacgtggcagttcccgaggccgtcagctacgcctttatctcgccatcgatccccggtttgggcgtaacgtccggcattacgttgcaggtacaggatcttgaaggccggggtacggagttcctggcggacgaaaccatgcgcttcatggattcgctgcgcaagcagccgcagatcggctccgtgaccacccagttcaacgccggcatcccccagcggcgaatcgaagtcgataaggagaaagcgctggcacagggcgtgccgctccggagtttctacaagacgatgagcactctgctcggcggttcctatatcaacaatttcaaccggttcggaaaactttaccagacttatatccaggctgcgcccgagtaccgtcgtgacaagtattcgctcgaaagctatttcgtggacgacggtcagggcaactcgattcccgtttcgtcgttcacgaccgtacgggatactacgggtgtcgaattcgtctcgcagttcaacctctaccggtcgatcgagctgacggtcaatcccgccgcgaaagtttcgaccggtcaggcgatggacgccatcgaagcggtggccgccgacgtgctacccgaggcggtcggaaccacctggagcggcttatcctatcaggaaaagacggcttcgggcagcagcggcgccgtttacctgctggctattgtcttcgtgttcctgactctttcggccctctacaacagctgggggctgccgctggcgatcctgttgagtgtcccgctcgcggtgctcggcgcactgttatttgtcggtgcggcgtacctggtcagccctgagtttatcaataatatctacatgcagatctcgttggtcatgctgatcggtctttcggccaagaatgccattttggtcgtggaatatgccgatcagctcttcttcgagaagaacatggacctgaaggccgcgacgatcgaggcggcgaggctgcgtatgcggccgatcatgatgaccgccttctcgttcatcctgggcgtcatgccgctgatcttcgccagcggagtctatgctacggcccgcaatattatgggtatggctctggtgggcggtatgttgctcgccacgatgctgggcattttcatttaccctgctctgtattatctggttgcccgtgtcggcaagttcgaacacaagcgggagttaaaacaaaaagagtcatgaaacgatactttgcaatcattctgttcgctgccgcactggcatcgtgcactccgaaactctacgacgcgcaggtcgaagtgcctgagaattatcgcttcgcgggcgatttcccgcaggattcggtgtcgctgcctttcgcctggtgggagattttcggggattcgacgctcaatcgcctggtggagcacgcgctcgagaacaaccgcaatctggcgcaggcggcttcgcgcatcttcgaagctcgcgccaatatcgccgtggcccgtgcgcctttcctgccgtcggtcggattgaatctttcggcacagggaaactataccgagccgaccggtacgacccaacaatatacgatcgaaccgtcgatttcctgggaagtaccccttttcggaacactccgcagcgctaaccgggcggctaaggcagctctctactcttcggagtggggctaccggggcgtgatgctgtcgctgacggcggaagtcgccacctcctattttaccgtgcttcaatacacccgcgacctgcggatcgcccggcagagctatgtgctgcgccgggagtcggcggcgctcgtggattcgctcgcccgttacggcatgtccaacggcgtggcccttcagcaagccatgagcctcgtctatcaggccgaggccgatattccgcagtatcagcgtgccgtcgagcagtcgcgtctggccctttgtgtcctgctcggcgagaatccctcctatttcggggacgaaactttcgacgatgccttgctggacaattatcaggtaatggatattcccgtcggacttccttcggaattgctcgagcggcgtcccgacatcatggaggcttcgttcaacatggatgaggcggccgcgaacgtggggcttgcccgtagcaagcgttttccgtcgattacgctgaccggagccgggggtatcgtttccagttcgatcgaaggtatttccgacggtcattcgtgggcgtggtcggccgtcgggtcgcttgtgcagccgatctttaatttcggcaagctcaagcggcaggagcaggttgccagggagcgatattatcagagtgtgttcgcctatgaggagaccgtgctcgaagcgttgggcgatgtggaaaagagtctgctcgacatcgctacctaccgcagccaggccgagaattacgcccggttgctccgggccaatatcgagatcgccacgatgaccaattcgctctaccgcaatggtatgtcggcctatctggacgtgatcgacgccgaacgaaacatgtaccagtcgcagatggagtatgtgaacctcgtagctcaacagtatatcaattatgtgaatctgttcaaggcgttgggcggcggttggtagccgtcgccggcttaccggccggaagagcggttgtcccgctccgtgctgtaggtctgcctgtaaaagaaagaagaatcaaaacaaatttttacttcttctttcttttttaatatcgcaaatttcactatctttgttagcgtatgtactaataaaaatctttttttaattctattaattagtaaaaaattatattatggaactgccttttgctgaatcatggaaaattaaaatggttgaacctatccgtaaaagtacgcgacaagaacgtgaaaaatggatcaaagaagctcactacaatttatttcaattaaaagcggatcaagtttatatcgattgccttaccgattcgggtacgggtgcgatgagcgaccgccaatgggcggcgatgatgatgggagatgagagttatgccggctcttcatctttctttctgttgaaagataccattacccggctgaccggatttgaatatgtaattccgacccatcagggacgagccgcagagaatgttcttttcagtcatctggtgcataacggagatattgtcccgggcaactcgcattttgatacgacaaaggggcatatagagagccgtaaagccgtagcgctcgattgtactgtagatgaggcgaaagacacccaattggaagtgccgttcaaaggcaatgtcgatcctgcaaaactggaaacagccctgaagcaatataaggacaaaattcctttcatcatcgtgacagtcaccaataataccgccggtggccagcctgtttccatgcaaaacctgcgggaggtgcgcgcccttgcggacaaatacggcaaacgtgttattttcgattcggcacgcttcgtggagaatgcctatttcatcaagacccgggaggacgggtatgcggacaagaccatcaaggagatcgtaaaggagatgttttctttggctgatggcatgactatgtcctccaagaaagacggcctcgtaaatatgggcggttttattgctaccaggcatgaagactggtatgaaggtgcaaaaaaattctgtattccttttgaaggttatcttacctacggaggtatgaacggccgggatatggcggctttggccgttggtcttgaggaaaataccgagtttgataatatcgaaacacgtatcaaacaggttcaatatcttgcggcgcgtttggatgaatacggtattccctatcaaagacctgtcggaggtcatgcgctgtttgtcgatgccgacaaggtgctctcgagtgttccgaaagaagagttccctgcgcaaactctcgctatcgagttgtatttggaggccggtatccgtggttgtgaaatcggttatatcctcgcagaccgtgaccctgtaactcgtgaaaatcgctttggaggccttgatctgctccgcttgtgtatcgctcggcgtgtttataccaacaatcatatggatgtaatcgcagcggctctaaaaaatgtttacgatcgtcgtgacgaaataaaacgaggcgttaaaatcgtctgggagacggaattgatgcgtcacttcactgtaaaattggagagattgtaggatgtcgatagcagatcggatattgcgggtcaaaagctccttgcccgggcaggtggagctggtggccgtttcaaaaacctaccctgcccagcggatcatggaggcttacgaagccggccagcggattttcggagagaaccggcctcaggagatggctcagaagtacgaggagcttcccaaggacatcgaatggcacctgatcggccatttgcagaccaataaagtgaagatggtcgtgcctttcgtggcgatgatccattcgctcgacagcgttcggctggccgaggcgatccagaaagccgctgccgctgcgggccgtacgatcgacgtactgctggagatccacgtggctgacgaggagtccaaatcgggctgggagtgggcggaattgcaggaatacgttcgcagcggcgcctttgcacggctgcccaacctgcgggtgcggggtgtcatgggcgtggcgaccaacaccggcgacgagcaggtcatccggcgggatttcgccgctttgcaacggtataagagcgagttgtcgccctatttcgggccggagttcgataccctttcgatcggaatgtcccacgactaccggatcgctctcgaatacggagcgacgctggtgcgtatcggttcgctgattttcggcgcccgcgattattccaaatgatccgagagccatatcgaaacggccgtgccgccgggaagaatcggcagtaaaaaagcgggccgcagtagcgatactgcggcccgcttatgtggaaataagtcgggaaaagccttgtttcgcaaaggcttttgccctattgtttttcctcgtcccggtctgctcagcgttcgagcgtctgacgcacggcctccttatagtccttgtcggtaatctggtaggtccaacggacggcgttcgggcggtcaggaaactcttcgagcacccacgccgactggtcgcgcggtgtgccgctcattcggaatcataggttcaaagaaaaagtaatgagcggatgtgcctaatttttattagctatttgataatttgtttccggagtcgcatcatccggtacggagccagtttcataccacaccccgccctgttccggctcgtctgtttgtttagcggacccggagcttgcgtccgagccgcaggatcgtggtcgatttgataccgttgagcgaacagagcttcgataccgtcgtgccgtaccgtcgggcgagagcgccgagcgtatcgcccgacttgatcgtatggtaagttacggcggctctttccgcagcctccttcttgtcggccttttccacttccgcctcgtcgtcgaaatcctgtccggcgttggaccggatgtcgaagaacgatttcttgagcaggaatgtctgacgccgcagaatgcccgattcgaagtcgatcaaccgctccgggtcgaaagcctgtccgtaataacgggtttcgaaatgcagatgcgggccggtgctgcgccccgtcgaaccgcccaggccgatgatctgtcctgcctcgacccattcgccgctctgcacgagccgttcggagaggtgtccgtagtaggtttccagtccgttgtcgtgacgcacgatgatcaggttgccgtagccgccccggttatactccgagatgcggacccggccgtcgaaagtcgcataaatgggatcgcccgttttgaccggaatatcgactccctgatggcgccggcggtagcggatgccgtatttggagcggatgctgcctttgtagggataatgatagcacttgagcgaatccaccagatcgatcgcaagcgaagcaggcatctccgacagcggatattccttgtacgggaacagcgtgcttgtgtcccagtatttggtgtagatcgagctgtccttgacaaactctctgtcgcggacgtatttccacgaattgtcgttgtaaatgacgattttcaccgcttcgttgatcgtttgcagcgtgtccagggggatgattccgttcatgttggcgataggttccacgggatcggaaagcagtgcgggtttttttgcggccagggtgtcctgccccttttcgagcaggtcgagctgccgttgcagcgtttcgatctgttggcggagctgttcggcattcggtgccgtttgcaggttttcaccggtgtccggggccgtctccgtatggcggtcctgtgccgctgccgtcgtggtgagcagcagcaaggcggaagcgatgatatgtcggtttttcatttcgtgtcgttgtttctctattgattcttgagcagttgctccgctgtttcgagcgctttgtagaactcttcgccgaagcgacggatgatcggctcccgaagcgccttgtacaccgggatcccgagccgttttccgcattggcgtgccggttcgcagaccgaccagcggtggtagttgagtccgaccgtgccgttcgagaagttcatcaggcggatcggatagagatggcaggagatgggtttgcgaaaagtcgtttttccctcccggaacgccttttctatggcgcagaaggtgatcccctcttccgtataggcataggcgcattcggcgtcgtccaccagcggcgtggtgtagtccccgtcttcgtccacgaccataaatccctgcgcttcgacggcccggatgccttcgggcgtcatgtagggcttatagttgggatattcctcttcgagcgtatcgacttcgtccgtttcgagcggtgcccccgcgttgccttccacgcagcagatgcctttacaggcccccaggtcgcaggcgaaacattcgcgcagcaggtcggtgctgacgatcttatcgtctatctcgatcataagtgtcttcgataatcaggtcgtacagttccccgagcgtcatgccggcttcgcgcacctgtttggggacgatgctgccgccgctcatgccgggaatcgaattgatttcgatcaggtaaggcttgccctcgggcgtgacgatgaaatccacgcgcaccacgccccggcagcggcaggctttgtaggccagcgccgtcaggcggttgagttccgccttgatttcgggcgcgatgtccgccggtgtgatttcgtccgaacagccggccgtatatttggcttcgtaatcgaagaactctttcttggaaacgatctccgtgatcgggaagatgtactccctgcctttggcgatcagcatgccgcaacccatttcccggccttggatgcactcctcgatcaggatttcgtcgctctcggtgaaggcttcggcgacggcgggcaggatatccgcctcgctctttactttagttacaccgaacgaactgccgctggcattgggttttacgaacacagggaggccgagcgtgcggacgatctccttcggatcgatccggctgtcgcggccgaagaaaaagccccgggccagcgggatcccgaattcggctacggtgcgtttggtcgtgatcttgtcgaaggtgactaccgacgaggtcattgaacaggaggagtacggaatccccatcatgtcgaggtagccttgcagacggccgttctcgcccggcgtgccgtgaatcaggatcagggcgtagtcgaatgctttgtgctcgccgtcgatggtgatcgagaagtcgtttttatcgacctgccactgccgtccgtcgggcgacgtgtagtgccagtcgcggccgtgcaggtcgatgagggttatgtcgtatttcgcaggatcgagcgccgatgcgatctgtgcggcgctctggagcgcgatctcccgttccgaggagtcgccgcccgccatcagggcgatgttgagtcgtttcatatcaggggttgtagatgtccgtatgccggaacgaaagaatttcataggtcatctccacgaattgccgggcctcccggtggtcgggatcgatttgcagcgcccggttgaagtcgttgagggcttcgccccattcgttgcggcggtagtgccactgaccgcgttcgacgtagagggaggcgtcgtcgggagtcgcttcgaggcgtgcggtcagcgatgcgatgtagctggccggactccacaggtctttttcccggatgtatcgcatcaccccttcgggcagcatgttgccgacatcttcgccgcgaccgagccgctcgcggatctcgctcgacgagtacggatacagcggcgcgtcttcgaggagggtgattcgtcctccgaggtcgggcagcggctgtccggtacggggatagacgaagatcggatagttgtcgatgatttcgcggtactgtttccattcgggcagttgcggcaccaggtcgtcgcccattaggatcgagaatcgcatctgcgtaccgtagttctccgtcaggtgacgcagggtgtggatcgtgtacgacggtttgtcgagcatgaattcgatgaccgacggtttgatcttgtcaggatatttcgatgcggcgcatgcggtttccgccatcgagaagcgatccagctccggagcctgctgtccggcgggcttgagcgggttttgcggagaaaccaccagtacgacttcgtcgcagagtcctttttcgatcgcatattcggccagcgcgatgtggcccttgtggatcggattgaaggacccgaagtagagcattacgtgtttcacggtattgtttgttttgtcgtttatttttttcgttcggtcccggctgggccgggaatgatccgcgaagggcgccggaacaggttcggaaccatatccgtcggattttgagcgcgttttgcccgcaggcatcctatcgggcgagaaaatccgagaggatgcgggtcgcctcctcgatggcctgggcaagatcgtcgttgacgaccacatggtcgaattcgggagctttggtgagttcgaactccgccttggctaccctgcattcgatggtttcgggcgaatcggtgccccgtttgacgagccgctcgcgcagagtctcgatggagggaggcatgatgaagatcgcacaggcccgatcgccgaagatacgtttgaggttgagtcctccgatcacgtccacgtcgaaaacgattacgttgcctttttgccagatccgctccatttcgctgcgcagggtcccgtagcaggtcccgctgtaaacttcctcccattcgacgaatttatcttcctgcacggcttggcggaactcctcgggggagaggaagaaataatccacgccgttcctttcctttccgcgcggtgcccggctggtggctgaaacggaaaattccaaccgggggaatcgctggagcagctcccgtacgatcgtagtcttgcccgaaccgctcggagcggagaatatcactaacttgcccatcgtctgccgtcggttataggatattgagaacctgctccttgatcttctccagctcgtccttcatcttgaccacgaggatctgtatctcggagttgttggctttggaacccatcgtgttgatctcgcggcccatctcctgagcgatgaagcccagcttgcggcccgcgcactcctcggaggctgcgacctcccggaaatagttgcagtggttggtgagccggaccttctcttcggtgatgtcgagtttctcgatgtagaagatcatctcctgttccaggcggttgttatctacttcggcctgcaactgcgccaaactctcccggatgcgggcgcggatggcttccgtgcgggctttttcgaaaggaatgacctcctgtttgtacgcttctatccggtcgatgcgcttcaaaagatcggcgatcagaatcgctccctcctgcgtgcggaattcgtccagatgggcgagcgcctgtcccactgcgtccagtacggcagcgtgttcctgttcgcttacactctcttcctgtgaagaaacgacgtccggcaggcgcaggatcgactggatgagagcattgttttccgcgctgcccggagtgccgatttccggttgttcccggcagattttcagcagttgattataatataagtggaacaactcttcgtcgatgcaggcgcgcgtctgccgggcggtcgattccacggatatgtaaagatcggctttaccgcgctgaagagctttcgccgccaaagcccggatttcgtattccaggggccggtaggccgaaggcagtttgacggcgaggtccaactgcttggagttcagcgtgcgtatctcgaccgttatttttttatcggggattgcgacttcggctttgccgaagcccgtcatggattttatcatgtgggtttcgtcgaaagttaaattcgtgcaaatttagtaaaaacaatttaattccggccttgttgagctcccttttccgaggcagggaaaatttatcgggtttccttggcggattggtgaaataattcctatatttgtgtgcaattttgaagaatacctgaaataatagctataatttaatcactgttaaagttttatgaaaaagcacaatttcaacgcaggaccctgcgtattgcccagagaggcggtagaatctgccattgaggctatccgtgatttcgacaacacaggcatcggcctgctggagatttctcaccgtactccgggttgggagcgtatcatggccgaaaccgagcagttgtggcgcgacctgctgaacattcccgacgactatgccgtaatgttcctgggcggcggtgcttcgactcagttcttcgaggttccggcgaacctgctgaaaaagaaagctgcctacctccagaccggtgtttgggcgaagaaggctgctaaggaggctaagttctacggcgaagtggagatcgtcgcttcttccgaggataagaactatacctatattccgaaaggttacaaaatcccgaccgatgcggattatttccacattacgaccaacaacaccatctacggtacggagatccacgaggatatcgattctcctatcacgctcgttgccgatatgtcgtcggatatcatgagccgtccggtcgatgtgaagaagtacggtatgatctacggcggtgcgcagaagaacgtaggtcctgccggcgtgacgttcgtcatcatccgcaaggatctgatcggcagctcggagcgtccgttgcagacgatggtcaattacgctacgcactatcccgaagaggctcgcaaccactcgatgttcaacacgcctcccgtactcccgattttcgtaatgcacgaaaccctgaagtgggtgaaggcacagggcggtgtcgaggccatgtataagatcaacaagaagaaggccgagacgctgtacaacgagatcgaccgcaactcgatgttcgtcggtacggccgtgaaggaagaccgttccatgatgaacgtctgcttcgtgatggctccgggccacgaggatctggaggctgaattcatggctttcgccaaggagaagggcatggtcggcatcaagggtcaccgttcggtgggcggtttccgcgcttcgatctacaacgcatgtccgcaggagagcgtggatgcgctggttgcctgcatgcaggagttcgagaagaaccacaagaaataattaaccggatttgatctatggcgcagttctttacttttacgccgaaacgtaaggaggacggcgccatagatttttatacattaatggacgttttcgatgaacggaaagaggatgggactacctcccctgccgggcatggggagcgaaaaataaaattcaacgatatgaaagttttaattgcaaccgagaagcctttcgcaaagaaggctgttgatggaattaagaagatcattacggatgccggttacgaagtagcccttctggagaaatatacggacaaggcccagctgctcgcagccgttgccgatgccaacgccctgattatccgcagcgataaagtgactgccgaggtgatcgaagctgccaagaatctcaagatcgtcgttcgtgcgggtgccggttacgacaatgtggacttggctgccgcaacggctaaaggtatcgtggtgatgaatactccgggtcagaattcgaacgccgtggctgaactggcgctcggtatgatggtcttcatggcccgcaaccagttcacaccgggtaccggcagcgagctgaaaggcaagacgctggcgatccatgcttacggcaacgtcggcaagctcgtcggtcgtaagggcaaggcgctgggtatgaatgtgatcgctttcgatcctttcatcaccgatgcaaaggtattcgaggctgacggcgtgaagaaggtggacagcatcgaggagctttatgcacaggccgactacctgtcgctgcatattcccgctaccgagcaaaccaagaaatcaatcggccacaagctgatgacttcgatgcccaaaggcgctaccttggtgaataccgcccgcaaggaggtgatcgacgaggcaggggtgatccaggcgatgaccgagcgcgaagatctgaaatatatcaccgacatcgctcccgaggctgccgccgagatgagtgagaaattcggtaagcgcttcttcgctactcccaagaagatgggtgctgaaactgcggaggcgaacatcaacgcaggtttggccgctgcaaaccagatcgtcgatttcttcaagaccggcaatacccgcttccaggtgaacaaataataaaaatatccccttattttcaaacgataaagagagaatattatggtaaaaatcaaaccgttcgcaggtatccgtcctccgaaggagctggctgccgaggtttcgtcgcgtccttacgacgtgctgaactcgcaggaggccaaggctgaggctaccgagcgctcgctgctccacatcatcaagccggaaatcgacttcgatccgattgccgacgagcatgacgaaaaggtgtataagaaagcggtcgagaacttcaagaagtggcgcgacaacaagtggctggtgcaggatggcgaagagcactattatatttatgcccagacgatgaatggccgtacccagtacggtctggccatgtgctgctactatgaggactactggtcgggcaagatcaagaaacacgagctgacccgcatcgagaaagaggaggaccgcatgaagcacgtcgagcttcagcaggccaacctcgagccggtattcttcgcgtatcccgacaacgacgagatcaacaagatcgttgccgactacgtgaagaacaacaaggccgattacgatttcacggccgctcccgaaggcttcggccaccatttctgggtgatccgcgacaagaagatcaacgaccgtatcaccgagattttcgcaggtattcccgctctgtacgtggctgacggacaccatcgtaccgctgccgctgcccgtgtgggcaagaagcgtcaggagagcaaccccaaccataccggcaacgaggaatactgctatttcctggccgttacgttccctgcgagccagcttcgcatcatcgactacaaccgcgtggtgaaagacctgaacgggatgactaccgagcagttcctcaaggcgctggagaagaatttcaccgtggaacccaagggcaaggagatctaccacccttcgaagttgcacaacttttcgctctacctcgacggtcagtggtatagcctcacggcgaagccgggtacgtacgatgacaacgatccgatcggagtgctggacgtaaccgtgctgtcgaacctggtactcgaccagttgctcgacatcaaggatctgcggacgtcgaaacggatcgatttcgtcggcggtattcgcggcctggaagagttgaagaagcgtgtcgatagcggcgagatgaaggcggctttcgcactctaccctgtttccatgcagcagctcatcgacattgccgatacgggcaacatcatgcctccgaagaccacctggttcgagccgaaactccgttcgggtgtggtgatccatactttcgaggagaaatagtgtcccgtaagggattcaaaagagaaaggagaatcttgaacagattctcctttctcttttgtaattatatgctttcctgtatttcaccgggagcgtcgcgtccctagttctttagggtcagttcggaattgcagatgcaactgcgagctacgaatatgcgaccgtcggatttggtgttgcgaccgtcgaaaatggtgcgggcggtggaaagtaccgccctcgcagcagagcgcgatcagcttttttttgtgttgttggcgatagctgccaatgcacggaacgtttcggctgctgcgcgagtcaccacgacgattatgaagccgtagatcggattgaggacgatgtaaatgagcgaaccgctgccgaagaatgctcccgtacccatcatgcgaagcatggaggcgtcgccattcagaaatattgcggcgatcagggtgagcagtgctccgccgataccgacgaacatacccgcccattccccgaaagtctggatgaagtgcgagaatacgggaatggcgacgaaatcgtcatgcgctgtcgcagctgcatatactttttcgcggcggttccaccagatttgaaaaccgagccaggaaacgaaggcgatcacgagccagaccagaataaacgcggcgatcatccggcctccgccgtaccgaaacaggtcgttgttaatggccattaccagcagtacgatgggtgtcagcaggttgaggatcgccaggatcgcatacagccagcggaagggttcgcggaaaaacttaccggtgtcgatatacttgagtaccggttcgaaaaacgagaaaaatttgttgtctttcatacgcattgaagattttaaggttaatacttcacaataaatttaggtataaattccttgaaaaagaaattttccgcccggtttgtttgctgcgtggcggtgtgttatctgtccgaaacagaatgtttttgaatatattttaagcgttaggtgaaattttattacgaaatgttatcttaaaccgtaaaaaatgcgtacatttgtaagcaacttataataaatggatgtcttatggcaaaaattaaaggaacaatcctcgtcgataaggagcgctgcaagggttgcggagtctgcgtggcttcgtgtccctgcgatgtgctgcatttatcggccgaggtaaacagcaaaggttaccccgtggctcagatggctaatccggatgcctgcacaggatgtgcgtcctgcgcgattatctgtccggacagttgcatcacggtttatcgtcaaaaatttgaataaactatggcagagaaagaagtaaaattgatgaaaggcaacgaagtgatcgctcatgctgcgattcgctacggttgcgacggctacttcggctaccctatcactccgcagtcggaggttatggagacgcttatggaggagaaaccctgggaaacgaccggtatggtcgtactgcaggccgagtcggaggtttcgtccataaacatggtttacggcggtgcatcgaccggtaagcgggtgatgacttcgtcttcaagccccggtgtcagtctaatgagcgagggtctgagctatctggcaggtgccgaactgccttgcgtggttgtgaactgtcagcgcggcggcccgggtctgggtacgatccagccttcgcagggcgactatttccaggcttgcaagggcggtgcgcacggtgacttccacttgatcgtacttgctccgaactcggttcaggaaatgcacgatttcgtgggtctggctttcgacctggcattcaaataccgcaacccggcgatgatcctcgccgacggtgcgatcggtcagatgatggagaaagtcgtgctggctccgcagcgtccccgcaaaaccgacgcagagatcgccgaagagtgcaaggattgggctacttgcggcaaaggtgcccgcaaggatcgcaacatcatcacttcgctggagttgaagtcggaggtgatggagaagatcaaccagcgcttgcaggccaaatacaaggcgatggaggagaatgaggtgcgttacgaggctatcgactgcgacgatgcggattacgtgatcgtagcgttcggttcgtcggcgcgtatctgctcggcgacggtggagatggcgcgtgccgaaggtatcaaagtcggcttgctgcgtcccatcacgctctatcctttcccgaccaaagcgatcgccgacctggctaagcgcggtgtgaagggcttcttgagcgctgaactcaatgccggtcagatggtgcaggacgtgaaacttgctgtaaacggtgcagctcccgtagagcactacggtcgtcagggcggtatgatgttctcaccggacgaggtgctggttgcactcaaagaaaaactgattaataaaaagtaagaatatggcagaagtagtagaaatcaaacaggagaacctggtgtatgccaagcctaagttgatcacggagaacgtgatgcactactgcccgggttgcagtcacggtacgattcataaattggttgccgaggtgatcgatgagatgggcatggaaggaaaaacgattgctgtttcgcctgtcggttgttcggttttcgcgtataattatatcgatgtggattggattcaggcggctcacggccgtgcttgtgccgtagctactgcggcaaagcgcctgcatccggacagtttggtcttcacctatcagggtgacggcgatatgtcggctatcggtacgggtgagacgattcatgcggctgctcgaggcgagaacatcgtagcgatttatattaacaatgcgatttacggtatgaccggcggtcagatggctccgactaccctgctgggtatgaagaccgcgacgactccttacggccgtgatccccggttgaacggttatccttataagatcgccgagatgatggctcatctggacggtgtgacctatattacgcgtcagagcgtatataatccggctcatgtccgccagaccaagaaagcgattcgcaaggcattcgagaatgcaatggccggtaacggcttctcgctcgtggaggtcgtttcgacctgcaacagcggttggaagatgtcgccggtagctgctaacaagtggctcgaagagaacatgctgcccttctatcagttgggtgatatcaaggacttaaccaagaagtaagaggacaagaatatgaaagagactttaattattgcaggcttcggtggacagggtgtcctctcgatgggtaagattctggcttactcgggcgttatgcaggattacgaggttacctggatgccctcttacggccctgagatgcgtggcggtacggctaacgttacggtgattctttcggacaaacgtatctcgtcgccgatcgctcacgaattcgatacggctatcgtactgaaccaacagtcgatggataagtttgagtcgatggttcgtccgggcggtacgctgatctacgataccaacggtatcacgcgtcacccgagccgcacggatatcaacatctatacgatcgacgctacggcggagtcggcccgtttgggtcaggctaagctgttcaatacgatgattttgggcggttatctgaaagtttgccccgttgtcaaactggagaacgtgatgatcggactgaagaagtcccttccggagcgtgcctggaagatgctgcctgagaatgagaaggctatcaatcacggtgcggagattattcgcaaggtgcgttaatcgtccgatgattttttctgagtgtccggcttgcgaaggccggacactttttttatcgcttgcggcactatgtttgcgctgggttataaaacattaaacaagcaatactatggaaactgtaaaacaactgaataaacaggagttcacgaccaaggtcgccgatatcgaaaaatcgaagggcgaatggaaattcctgggtgagcgtcccgccgtgatcgattttttcgcgacctggtgcggtccttgcaaggcattggcccctgtgctcgacgagctggcggccgattaccaatataaggaccggatcgatttttataaggtcgatatcgaccgggaacaggaactcgctgcggtgttcggcgtacggtcggtgcctaccctgctgttcatcccgctgagcgggatgccgcagatgatgaccggcggtcgcccgaagagcgacctgaagcgaattatcgacgaggttctgatgggtaagtagtgataaatcgggtgatcgcatcttcggggtttcgacatccggatttttcgggttcgacgaccgatgtacggcttgatttcctatgcggacgtgccccgtgtaatcataggctgcaaacggtacgaccgtcggattcgaaaatccgaaaagaaacttcgagagatatgattgccataaattaaacaagcgatgaaagagttcataaaacacaatccggctacgctcgataatgtagaaacgatggccaatgcgatgatcgaatcgatgcgtttcgtcgataatacgttggattatcccgaagcggagaaggctcggccgaacgacggcgtggaacccgagtggttctatgacgcctactacggcgccattcccacctcggaactgacggctatcattcaatacacccaacagcggatgctcttcgaaaacattggcgaaacattcctggggatcgctttcgtcgaaatgaagcatttcgaccgtttgggcgattttatcggacaactgggtgggcgcgtgaatactccgaagtattcgagttcggcggttacggtcgaatatgaatcggctgccgaggccattcgggtcaatatccaggccgaaaaagatacgattgccgcctatcagcagttgatcgagcgtatccgaaaaaacaatcccgaaaagctgacacagtcggccacagtagctatccagcttctcaataagattgtttccgacgagcgggtgcatgtccgtattctttcggagctggcgcaatcggtcgcggcggaagagggaaaagaggcataatccgcttcccgatcgagccggtgtttttggagtgttttgtatcgctcgaaatccggcccgaaaggattcgcccgcgaatgaccggaaaaagagatcgaatacttggagatcctattggtccaaggtcgatggaatgtcggggatgatgtgaagaggctgtctgcaagttgcagacagcctcttcggtttggattcgccgataatttcgaacaggcggcttgtgccgtgtttgaaaatttgccggacgtattttagaatccgattccgatgcggaacaggatggcattcaatccttctcccatgtgctgaaagcggatgctgaaatcgccccgcactccgccgctctgacggccgaacgtgacgcccgggccgatggaggtgtaaaattcggtgccctcgttgaagtaaccccctacccctattgcggcaccgagatcccacgacagattgagggccgctttgcttgaaacgggcagataacccttcacattcgcaaatacggggaggacggttccgctattgcccaattcgtatatgttccaaccgttggagaaatagatgtctttgtagaaataattgattcccaagccgacaccggcgaatagatacggatttatccgcacgccgtgtaccgtttcgaatacgatgcggggaaatagatcttgcattccttcgcttacggccgaaccgtatgcgaaggcaacttctccctggtaacgaggtaatttgccgaattgttgtttgtcggcagccgatcgccgggaggaatcgaaatgcgagatgacctctttcgagccgttttgataggtgatggtgaagacatcctctgcgggaatcgtatagatcgggccgtccggattgtcccatctttggtattcgatttccgtgtcggttattttcagcactttagcttggatctccgtcgcatcttttttctggatgatgtcttgtgcgcagacagtttgtccgaggagtattgaagcaattatgaaaatcaggcgtttcataggaaattttcttttgagttgaataatgaatggtgttgtttgacaggtatataaaaaacgcaggctaaactttttatttgctttctgaggtcttcgcaataccttgtctgacaaataagagtaaagcccacgttgaacgtgagcgtttacactttactcttgtcagactttttgaaagttgcgaagtttcagaaagcaagaaataaagctaacgctttttatatgtattgtcatacccgtatcctatcggacggcatgacatattgtactgaagaatagaagagctgttattttctcataggcaaaatggttttatgttccgattacaaatatagtaaaccgattgagcattatgcgatttttacggcttatttttatttatcgtttcggtttattcattgctttgttgccgggcgttcgaccggaaattcgatgcttcgtctaaaaatcctcttcggatttcctcgttattccgattgcagatagcgttttatcgacagacgtaggagtttgcatcgcggaatccgagcagcagctcttgcgctgccatgcgtttcttgccggataattgcagcgagaggacgtcgatccaaccgtccgcacatcggatccgcaggtatttgcggttgtcggtgtcgatcgtgccgcatggagcttccggaccaccggcttcgaagcgcgcttcgaaaatcttggccgaattcgcctcctgttcctctcgcagcagccgggtccaggctgccggatagggcgacagcccgcgaatgaagtcgatgatgcgttttccggattgagtccagtcgatcagacagtcgtttttgaagattttgggtgccggccgcagcgatgtgtcctcgtcggactgtacgacgggggtgatctctccggcagcgatccgttcaacggtctgcacgaccagatcggctccgacggtcattagcctgtcataaagagttcctacgttatcttccggctgaatcggcatttccacttggcctaaaatagctcccttgtcgatttcgtggttcaataggaaagtggtgacgcccgttttggattctccgttgatgatcgcccagttgatcggtgccgcacccctgtattgcggtagcagcgacgcatgcaggttgaaggtgccgagtcggggcatcgcccagacgacctccggcagcatccggaaggcaattacgattcccaggtcgggccgaagctcctccatcgcactgacgaaggccggatcgcgcaacttctccggttgcagaatcggcaatccgagttctcgggccgcgatctttacgtcgctttcatgcaatttctgtccgcgtcccgccggtttgtccggagtagtgacgaccccgacgacgttgtagccgctgcgcaccagtgcacgcagcgacggcacggcgaattcgggcgtacccatgaagacgattcgcaaatccttggcgttcattttcgttgaaatattgctgtccggaaattcgcttccggctgtccggcggttccattcgcggttctgccatccgttccgttcatgccttgcggacaaggatttcggactgtggcaaaaccgggaaaatcccttcggacgattctccggtaatatctttagtattttaatgtttgcagaggttgagtttgtggtgcatgcgctcctgtttggtttcgaggtagcgttcgttgtacttgttgggggcgatgacgatcggtacgatctcgtcgatcttcaggccgtaaccctccaaccctactcttttgagcggattgttggtcatcaggcgcatgtgtttgatccccatttcgcggatgatgctggcgcccacgccgtagtcgcgctcatcgacgccgaagcccaggcgtacgttggcatccaccgtgtccagtccttcgtcctggagtttgtaggctgcgatcttgttgaagagtccgatgccgcgtccttcctggctgagataaacgatggcgcctttgccctccttctcgatcatgcgcatcgcttcgtggagctgcgcgccgcagtcgcagcggcacgatcccaaaatgtcgcccgtggcgcacgaggagtgcacgcggagcagtaccggctcgtcttcggtccattcgcccttggtcagcaccatgtgttccagcccgttgctcttctgacggaacacggtgattttgaacatgccgtattcggtcggcatctcggccgtttcaccgcgttctacgatcgattcgttgcgcaggcggtaggcgatcaggtcggcgatcgaaatgatcttcaggccgtatttctccgccacttcgagcagttgcggcaggcgggccatcgaaccgtcttcgttcatgatctcgatcagtgctccggcgggttgcagtccggccagtcgagccaggtccacggcggcttcggtatgtcccggacggcgcagaacgcctttctgacgggctcggagcgggttgatgtgccccggacgccccaggtcggagggtttggtcttcgggtcggccagtgcccgcagggtcgccgcgcggtcgtggatcgaaacgcccgtagtgcagccttcgcccaacagatcgaccgtcacggtgaacggcgtgccgagcagcgaggtgttgttcggctccatcatgttgagttcgagctgtgcgcagcgctcttcggaaagcggggcacacaacacaccgcgaccgttcttgagcatgaaattgacgatttcgggcgtcaccttctcggctgctatgatgaagtcgccttcgttttcccggtcttcgtcatcgacgacgatgacgatttttccctggcggaaatcctcgatggcttcttctatcgtattcagtactttttcgtttttcatggtctattttattttttgtttttatgtgcgaaacgtgcgaatatcccggagatcttctccttgattttcttgaattttacgacgtaccaatccacgtcgagcagccccgagtcgttcgtggccttgtatgtgaggtagatggcgacgggcgccagtacgaaggccgagagccacgtgccgtagaatgcctcccatgtaccctctttggccatcttttcgcccgaactgctgataatgtagtagatgacgaagaagatgaccgagattacgatcggcatacccagaccgcctctgcggacgatagcgcccagtggtgctccgatcaggaagaagatgatgatcgtcaccggaagcgccaatttcttgtgccattcgaccttgctgcggtagagctggttgagcgcatttttggcctgcgattcgtcgaacgagaacatagaccgggagttgcgtgcggccgaaacggcctggctccagattcggtccttggagcgcaggtcgagagtcgccagggagtcgagggcatccatcggcctgaaatcccgtttttctacgaccaccgaatcgtttcggtcggttatgacggtcgtatcccgcacgaagatacgctccttgagcaacgggtcataggatcgggtcgtcgccgaattgacctgctgtgtcagcgtgtcgatttcgtattgcagctcggagatgtttttggtctgggcgttgttgaacagatcggcatccgtgcgctgcatttcgaatcccgaaatggaaatattggctttctgaagctcgaatttattgcgttgcagggaacttttgttgtaccactgactcgaatttcgggtctgttcgtagcgttcgccgttgaagagcgtgatctccagaaagcgcttgtcgtccgagagccggatatagcccgaatcggcgacggtcgtggtcatattgcccgatgcgttgcggttgtcgtaaatcagtacgtcggtcagcagccctgtttcctgattctggtgtccgacgcggatgctcatgccgtcgatgccgttgaagaagagcccgtcctgaaactcgagggtctggttcatctggcgaatgtcgtatatcgtacggaaaaattttttgttggcgtatggcactaagttgttggcgatgaagaagctgccgacagccaatatacttacgaccacgagcagcggcctcatgatcttaggcagcgacatccccgccgacttcatagcgagcagctcgtagttttcgcccagattacccatggtcataatggccgccagcagcgtggcgagcggcagagccatcgggatcatgttgatcgtggcgtagcagagcagttcgatgatcgtaccgggatcgagtcctttgccgaccagctcgtcgatgtagcgccacagtacattcatcatcagcacgaacataatgatgaagaacgtcagcaccatgggtcccagataggacttgagaacgagtttatagatggttttcatcggcgcggcggcgttttttgacgagcaaagttagcagttttactaaaataagcgtaacggtcagggtaaatattatggccgcaccaggcgaaacttcgaaattgtagctcagggcgagtcccgcgaggttccccgcgacggcgacggctgcggcggccggtgcgagcgtgcggaaggatttggtgaacgtattgacgatcgttacgggaatagtcagcagcgagatcagcagcacgatgcccatgatgcggatcgagagtacgatcgtgacggcgatgagtgccgacatgacataggagatcagccgggtcgggattccctggctgcgggcgaagtcgcggtcgaaggcgacgtacatgaccggacgcagccaaaggagcgtgccgacagttaccacgagcgtcagaacggcgagcgcctggacatcggtgcgggtgaccgttacgatgctgccgaacaggaaattcgagaggtcgcccgaggtgtagcccgggcgcaggctcatgaacagtacgccgatggccatacccaccgaccagatgatgccgatggccgaatcctcccggatacggccccggtcgttggcccattcgatccccagcgccgagaggacggcgaagaccatcgcgcccagaatcggattgattccgaggtagaaagcgatgcccagtccgccgaacgaggagtgcgtgatgccgccgctgaggaagaccagccgccggcagacgacgtaagtaccgataataccgcacgtaatgcctgacaggatgcacgcccaaaaagcgtgattgaggtagctgtatcggacaaggtcgttgaaaaactccatggtgcggtaatcattagtttgcaaatttacggattttttacaaaaaaatagaaccgggagccgttttatatcgcagcatccgtattttgttccgtccgatttgcggggcccgtgctttgttgccgcagagagcggtatcggtcggaagacaggcggtgcatacaccggaattcgtatgctttttggtgaaagatattaaaaaatcgaatattcggtgcgtcatatcgttttttttcgtacatttgaatacgaatgcctgttcagacgttcttcggcattcgcaaaaccaattacttaatctcttaaatttttacatttatgcgtacatctttatttctcggtttgaccggattggcattgctggcagcatgcggactgtcggggtgcagtgatgacggtgtcgaaaacaaagacccacaactcccccccccacggttgatgtcagcgtagatgaagtaaatcgtacaacggcttcatttacaatcaatacgaacaatgcctccgactatgtctatgccgtattgccggccacagaaacgatcgccgatgcggaggcgctcttcgaaagaggacctgtccgttatttcgaaggagagaaaacagtaaaggtcgatctgaacgatcttgccggcgacacggaatacaatctttatgttgcggtacgcaacatcaatcctttagtttacagcgatctcgcttccgaggtgatcgacacgcatgttccctataccgagatgattacgctcgaaagtgtcggacttacctctttctcctaccatatcatgaagcccgaaggggtgaccaagtacaagcacgtctgtctttcgaagtccgactacgattacatcgtaagtttaatcggaggaagcctgcattcgtatgtaagtgctttcggtgcggaagcgaccgaggatcaaacctataatttcgataccactttcttcgatatcgtcgattttcgtcaggatatctattccgacatggagtttatcatcattgccggtgaagtggacgagaatggccaggtcgcagagtcggctgtgaagtcgctcctcttcaaaaccaagaaggccggtgtcgcgccttacgacttcgaggtttccgtgggtaacatcggttcgatgacggccgatattgccatcgatccggacgagggaatcgagcgtttccgttatcgggttgccaagcgggcggaattcgatttcgttgctttcgaaggcgaggcttccgtgcgtcgcatgatcatcggccactgggacgatcttacgaacgagagtacgaaggctatcaccgtcaatgcgacgggactcaaacccaataccgaatatcaggtgggtatcgtgggcttcgacaaggagttgcgcgaaaaggttctgctttacgacttcacgacgggagagcctacaggcccgaaaccgactttggccgtcgaaacacagactgtcgaaactccgtggaacaaggccgctttcaaggtcaatgcgacttatgcggtagcgatgacggccggtgttttcccgaagggctccatcgacgaagtgctcggccgccccggtaatgagaatcttacggccggcgatgtcatttacaacaacggtacgcagcttaccgaacaggaggtggctgcggctatgagcgaagagggacttgtcatcgagagtggagagctgctgcccaataccgagtacgagttcggcgtttatgcggccaacgcagaaggtgtgggcgtttccgaaatagtggagttcaccacccttttaccgccgcagcaaggcggggagctgcgtgcgaagctgcccggcaaatacactgcgacgaccaaagacagcaacggtgatccggtcactttctccgttaccatcgctacgggtgtgaacgaagctaccgagaaagcctattccgatctgaaccgtctggtcgttctgggcttcgcgccgtgcggagtggattatgccagccccgaagagctgctcgccaacggctgggcagcgaccgaagaggaggccaatgcgaattacgggccgaagtggttcatcgagttcaccagcgacgaaacgatttcgacgagtctgcctgtgaacaacgaactggattacacgatgttgaatttcgatggtaagcaatactatttccacgctttcgccaaacgtccgactagcgaccgctatacggatgcggtacgcagcttccctgtcgaggtgtcggatgatctgacagtgacgatcaagaagttggtcgaagaaaccgattacggtacctttacctactatcccggtgtgttgtcgggtacgagtcagtggtggggcgacatggtgttcgcagcgtcggaagagatcgtgctgaagcgcgatgccgatcaggggcccgagcctgctgccgtgaagagcgtgcgacatctctccatgcccgagcgcgtgaccgtaaacctcggagcgtcacctgcagtggacaaccgtcgagctgtggctgaacgattgatgcgttaatcctaaaaaacttgtgttatgaagaatttattcggatggatgctggtcgtactgctggtgctgacggccggcgtgtcgtgcagcgacgatgaagagcttcttgcgggcaatggaatcgccgatgcagcctggagtgccgaaaaccaggtcgagatcgaaggcggggtgcttaattacacgtttgccgccgcaagcgattggactgcccggagttcggctgactggtgcgaagtgcaaaccggttcgggtatggcgggcgaatcgttgctgcgtctgaaagttgccaaaaatacccgggccgaagctcgttccgcgacgattaccgtcagtgtgtggggatatgcttcgccggtttcgttcgtggtgaagcagggcaaaggattaattgagcagggggacggaaaataccgcagcgtgaacgaatgggttgccgagtacatgaagagccgttatctctggaatcgtgccatcgagaatgtttcgctcgattacagtctttgttatgacttctttttcttctcgattctcgacggtgtagccgctcaggacgaggtgaaccgcgaagacggtcattggcaggggcagaaacgtatgtattactattcgcgtttggaaagcgatgcgcctctgtcgcgtactcccggcgaggcgtatgtcggttcgggtatctatctgttggatgcgacccgactcggggacgattatatcggaattgtggtcatggtcgtcatccccggaacgccggctgcggaagccggtctcgtgcgcggcgacttcatcacggcggtcaatggcgaggaggtgaccgaaagcaactatcagagtttgggccgggccgtgtacgacggtgcggtcgatgttacggtgaacagtgtcacgtggaccgacaacgggactactcctgtgcttaccccgaaagggaatgtgcaactcggaagtgcgaccttcaccagtccggctatctatatggataaagtggtcgaaatcgaagagtcggacaagaaggccggttatctgctctatatgggcttcgatgtcgattacgatgaggagttgatagccgctttcgaccgtttccgtgcacagaatgtcaccgacctgatcctcgatctgcgttacaacaacggtggcgatgtgctttcgagtactgtgctcggtacgcttatcgcaggtgaggcgtacaagggacagctctatgctcatatgacgttcaacgaggaccgcacggaggccggagagagtggcgactacaagatcggcgtcaaggagacgttcgaaagcgtgtacgaaccgatcgaaagagccttgcaacatgctttgggcttgaagaaaatctatgtcctggtgagcgaaacgactgcttcggcgagcgaaatggtcatcaacggtctgcgcggccttgatattgaggtcaatcttatcgggatgcccactaacggtaagaacgtaggtatggaaggtgtggtccgctcgtttcacaattacgatttcctgcttttccccgtttcgttctatattgaaaatgccaagggcttccgggattactcggatggcttcacacccgatgtccaaatcgatgattcggcgatttatccgggtgaattcggtacgatgatggatcagctcggataccttgccctgcagtggatcaagaccgataacaaaccgcagttgccgtccgccatgcacacgcgcggcagttgccggtcgatgagatctttcggcgatctgtgggaaaaccggcccgtacagcctgtgggcggagccgtgatgcaacccgtgagagaggaatagaccgctctgttttacgtatgccgcaggggtgcccgttgcagggcgcccctgctcttttatccggacgtgtgtgtgatttttgccgataaaatggtcggattcgcatagtttttcgtactttcgctcaaatttacagcagaaatatgcagcgacgcagagtcaattttcacaccttgggctgcaagctcaacttttcggagagctctaccctcgcccgtgaattcgaagcgggcggcttcatccgggtcggggtttcggaagcggcggatatttcggtcatcaacagttgctcggtgaccgaacatgctgacaagaaatgccgcaacctgatccgtaaaatccatcggcgcaatccggcggcgatcattgtcgtcaccggttgctacgcccagctcaaaccgcaggaaatcgcctcgatcgaaggggtcgatctggtgctgagcaacaacgacaagggcgaacttttcaggcgtgtagcggctcttgcgggcaaggggcccgcacagttcaccagttgcgacgcggaggagctgaccaatttcttcgccgccttttcgagcggcgaccgtacccgcgcgttcctgaaagtgcaggacggctgcgactataagtgcgcctactgtacgatccactatgcgcggggtgccagccgcaatatgccgatcgccgacctggtgaaggaagccgaacaaatcgccgctgcgggacagcgggagatcgtcatcacggggatcaatacgggcgatttcggacgcacgacgggtgagcggttcatcgatctgctgcgggccctgaacgaagtcgaaggcatcgaacgctaccgtatatcttcgatagagccgaatcttttaacggatgagataatagcgttttgcgcttcgtcacctaaattccagcatcactttcatatcccgcttcagagcggttcggacagcgtgcttgcacggatgcgccgccgctatacgaccgaaaaattcgccgagcggatcgaggccgtgcggcgcctgatgccggacgcctttatcgggatcgacgtgatcgtcggttttcccggtgagacggagtccgatttccgtacgacctacgagttcctggagcgccttgcaccggcctatttgcatattttccccttctcggagcgtcccggcacgccggccgtcgattttccggacaaagtgcagccttcggtggctacacggcgcgtggaggagctggaagagctttgccgccgactgcacggcgaattctgcgcccgggccgaaggtacgacggacgaggtgttgttcgagagcacgatgcggggcgggatgatgttcggctatacgggcaactaccgccgggtcaaggccccctacgaccggagtcggatcaacacgatttgccgggtgcggctggggcgtatggacgatgcgaacgatctcgaaggcgaaatcgtggataattagcgatttcttcgtatatttgtatcaggcgaaggttcgggtgaatttcgtttcagcattccggccggatgcggccttgcctccgggtcgcattgtattttgcgaaaatggcctgtatttcgggcgggaggcggcggctgggcttgccgtaccgtccggtcgtttttgtaagaacgagttgcggtgtagtctgccgaattcggtattggttacgccttgaactgtttttcggaatacggcttgtagctcggtaagattcaaacaagtttgcttttgcccttgccttgcattatatttgttgcatcgctccggatatgttcgggtggggggactgccctgccgatacgggcggtttgggacgattttaacagttaaatgcgtatgacgggaattcgaagaagaatgtccattgctttcctgagtatcgtcgggttgttgttcgcctcggggatgatctcttttttggagctgagtcatctgagttatgataccgaggagattttgaaagccaaccagcggaatatggagctcgccaaggagatgctcggtgccgtgcatgaccaaaacgtggcgatcgtccatctggcgatcctgcaagatgcgagttacgacagcctgtgccgtacgggaatgcagcggttggagcacgcagtggctacggcccagaagggggcgttggaccgctcggcgctcgactccctgacgggtgcgactaccgagttgctggtgctgaccaagatgtttctcgcgaccgaatccccgaaggcaggggacgagtcgggagaggtgtggtacaacgaatattatgaaaaacagtacgaaaaggtcgtcacggcggttcgggactatatgacttcgacgcagagttcgctggctccgcgggccgagcagctcaagaaaaacgcttaccgggccgttactcccgtgctgatatcgctggtggtgatgatcgctacagtgttgatgctcttttactttacgatgctctactgtgtcaatccgatcgtggcgatgaacaaggggctcggacagtatctgaccttcaggataccctttgccgtgaaagccgagtgtaaggacgaaatcctggaactcaaggaaaaaatcgaggcactcgtcgccatgctgaaacaaaataaagcgtagagagtcatgcgggtcaatgtgatattgcgatacgtgggaatgattatgctgttgttggcattctttatgttcgtttcggcagggatctcctatgtcaaccacatggattccgcgttttacccgttgctgctctcggctctgctgacggcgctgttggggggcttcccgctcattttcgtggaaaagcaggatcggatcaccaataaggaggggttttgcatcgtggtcggttcatggttgctcgcctgcgtcgtcggtatgtttccctacctgatctggggcggtgagttcagcgtgataaatgcttggttcgaaactgtttcgggctttacgaccacaggatcttcgattttgcaaaatgtcgaggcgctgccccggggattgcagttctggcggatgtcctcgacctgggtcggaggtatgggcgtggtgatgttcgcgctggtgatcctgcctgcactgggtaccagcaaaatgatgctttcgagtgtcgagatgtccaccctggcccgggacaattatcgttacagggctcagatggtggttcagatcttgttgttcgtctatgtcggacttacgatatttttcactttcatgctgaaattcgccggaatgaactggttcgatgccgtatgtcattcgatgtcggcctgtgcgaccagcgggttcggaaccaaaaataccagtgtcgccttttacgacagtgcgatgatcgacatggtactcatcttcgcgatgggtatttcaggcatccatttcggtttgatctatgcgaccgttaccggtaagcgcaacaatattttccgtagcgaagtcactttgttttatctcggaatgttgattctgggaagcctgctgatcgccctgagtttatatatcgccgatatttatcctacgttcaggtcatcgctgcgtttcgcgtcgttccagtttgtttccgtgacatcgacttccggcttcgctacggccgattccagcctgtggactccgttcgcaattattttgctgatactgggctcgttgatctgcgcttgtgcgggttccacctcgggtggtatgaaggccaatcgagcattgatggctctgaagatgctttacatccgggtgaagcagcagcagcatccgaatgccgtcatccggctcaagatggacggtgtgattcaggaagcgggcgtgctgcatacggtgtcgcttttcatcgtggcctacctgcttctcattctcatcggaacgattctctgtacgcttttcggcgtagatctgatgaccagtttttcggggtgcgtggcttctatcggcaatgtaggtccgggatttggaggggttaattcgatggccaactacggtgatttgccggcgatcgtgaaatttatcttcacggcgcttatgttgttgggacgtctggagatattcggattgttgcaattcttgttaattagatggtggaaatgatgtggcataagttattgatcggtttatttttgaccttctcggtcgttatcgtgcgaggagcttccgacccggcggggcccggtattcctgccctgcagtcgaattcggaatacgttgcgcttcgggatcaggacagtcggttgcaggtccggatcgacgagatgcagacccggattgcaggactgcgtgcgatgctgcgggaaaatccggccgcacaggagacttacggcgctcagattctctcgctcgaaagcgaaatgctctctgcccagggactccgtacgcaggtcgcggcccggatcaacgccatcgagcaggcttggctgaccgaacatcccgattatgttccggcggccgaaacggaaaaatctcttatcacgcagactcccgaatcgcagcagagtcggaatctcgtgttcaacggttatttccgtgagaatcttccggcacgtgattacgaggctctgctccgggcgcagcgcatggaggcggaggtggccggatgtgccgggcgcctgctggagaactaccggcagcagactcttttgaagcagcagtacgataccgttcgtacggagcaggcggctgtcgatcttttcggtcgttaccgcacggtagccaacctgggccgggttttgcgggattcgctgacggccgtatggggatatgtgtatgataacaagagctatgcttacgattatatcctggataagttgaattgcagggaccagcaggcacgtcagcagaaggcgttggacgatgtgcggcggcagatgtctgcggcccaggccgaagggcttgttgatgcgcttcccgattattatatccagaaatgctatttgacggattatgagcgggaaattgcccggatgctgggattgggacttgcatccgattccttgaaacaggtggctgtacggcttcagacgatagattttcgtcttccgaagccggagattacggagcgctatttcctcgattacgaaccggtccaatttgttgcggggcgctatacgtataagaaaccgattccggactgtcctgtctatgagcacggagtgatctaccgaatcctgctcggggagtataagtacaaacagaatatctccattttccgcagcgcttctccgctctatgtattgaagaccgacgcggggcgctaccgttatttcgcgggaggtttcgcgaccaaggccgaagccgtcgatgcacaggagttgctgcgggcgaaagggttccgccgtccggaactggttgtgtggtacgatggggaatataccaatctgacacggactcccgaggcggaaatggccgctttccgggtggaaatctccagtgagcagaatctgtcggataccgtgaagcaggcgattgcgcaggccgctcccggctgcgacctgtcccgcgtgggggcggatcttttcgtcgtcggacagttcgacaacaaggctgtcgcggatcaggcggctgccgcgattcgcgccgccgatcctcaattatcggtaaaagtgacggaaattgctaaataatcggattttttgcgtatcttcacccgaaagaaataggtccgtattcggacgtatatcggtgaatcgggggaaattcgacctgcgagccggttattccgatctttttcagcgattttaacacggtgaatatgttttttatcattctgttggtctttttcgggttactgtttctggtggcggaacttgtcctgctgccaggcgtatcgatcggggcgattctcgcgctggtcagctatggaggcgccatttatatcgccttccgggattacggtcctttggcgggcggaatcgtcgtcgccgtcgttctgatcctttcgttcgcggcgaccgtcgtttcgctgcggtccaaaacctggcgccgtttctccctgaaacagaaagtcgattcctctgtgatgcccgaaccggtgcagcagagtgtccgtgtcggagatacgggaatgaccgtttcgcggctggctccgatgggaaaggtggagatcggcggtaagatttacgaagccaagtccatggacagttatatagatccccgccgggaggtcgaagtcgtcggattcgaaaatttcaatataatcgtacgcaaacacattaaataaataaaagatggaaatcggtatcattgcactaatcgtcttcgtttcgctctttgcgatttggcttattttttacttcattcctgtgggcctgtggttttcggcgctggtgtcgggcgtgcggatcagcctgttgcagttgatcctgatgcgctggcgcaaggtgccgccttcgacgatcgtatcgtcgatgatcgagagtacgaaggccggtctggaactcaatcccaacgagctcgaggctcactatctggccggaggtaacgtgaccaatgtggtgcatgcgctggtgtcggcccagaaagccaatattatgctcgatttcaagatggctacggcgatcgatctggcgggccgcgacgtattcgaagcggtgcagatgtcggttaatcccaaagtcatcaatactccgccggtagctgcggtggccaaggacggtattcagttgatcgccaaggcacgcgttacggtgcgggccaatatcaagcagttggtcggcggtgccggtgaggaaacggttctggcacgtgtcggcgaaggtatcgtttcgtcgatcggctcggcacagtcgcacaagatcgtgctggagaatcccgattcgatctcccgcgtggtgctggagaagggattggatgcgggaacggcgttcgaaattctttcgatcgacatcgccgatatagacgtaggtaagaacatcggcgcacagttgcagatggaccaggccgaagcggacaagaacatcgcccaggccaaggccgaggagcgtcgtgctatggccgtagctctcgaacaggagaacaaggccaaggcgcaggatgcccgcgccaaggtgattctggccgaagccgaagtgccgctggctatggccgaagcgttccgcagcggaaatctgggcgtgatggattactataagatgaagaacatcatggcggatactacgatgcgcgaaacgatcgccaaacccgataagaaataggacgacgaatcgttgttcgcatgaaaaaccccgttgaaatctcaacggggtttcttttatcgatatgggcgggaatctatcggagcgtattgtagaatggagcgtcccgtttcggggccgaagtatatcgagccaagccgtacagcgtgccggtggactctattttattcgaatggaacggcaggccggtcagtgggtttcgatttttgcactggcaacgcttcgggggagcgtttctccgtcgggggttccctccagcccgtctttccatttgacggcggcatgcgcaccgtcgcaatagggcttgttgcgggagtgtccgcagcggcagagcactaccctgttccgaacttcgaaggttcggccgtcttcgcgttggatgcggatcccgccgcgtacccagagtcctccgctggcgccgatcgccgggtcttcgatcaatcccaggctgggttcgaagatgaattcgtagggttttcccgtgcggttgtcccaggcggtcaggcgggcgctcggacacatcgaagcttcgcggacggccagcttgcgggactgcgaatcgccggatgcggccgtcaggtcccagacacccccgtaaggatggcagaaacgggcgaaaacacagtatttttcgttgtcgttcaatgtcacccgttgtccctcggtgatctctacttcgtccataatccggtcctctccggaggtgatcgccgaatcccattcctccttgaggtgcgagccgtcgcaatagggtttgctgcgggataaaccgcaacggcacaatgccgtcggttctttttccgtcgaaaaatgccgcccttcctgaaaataccaactctcgccctcggagtcgggcatgatgaattgcatggccagcggcgggtttccggtgacgaggtacggacccttttcggtgacggtaatggctatttggttcccttcggaagatgattcgtggggcgatgctgtcttttttgccatatcggatgcgtatttttaagtcgatttgttacgttacctttgcaagaattgttcctaacggaatttctgttgtcggaagaatcggaaattagctgttttagtaaaaatgtcgaggttaattttgcgaaaataaggccatgttccgacaggacctgtttgttctgtatgtggtttgtactatctttgccgaagatggggtgcggttcggcgatttttgcgtacaagtctgcacgattactctcgcctttccgtatctttgacatcatggtctttagataggatgcgcttcggaaaaccgggacaggttcccgttttctctcggctttccctgtctttggcttcgttttggatgctttggctttggtcaaacgcaaataaaattgcttttgcattaggcttattcgtatctttgacttcgtcttagatacttcgccccggcaaaacgcgaataaaatttgcttttgcgctcggcttattcgtatctttgtaacgtttagcaaaattggattttgaacatgaaaaaacttgtgtgccgctttttatgcctgggaatcgtcctggccgtttcgatgaatctcgtcggttgcagcgacgacgacggaccggtgggaaccctctatttccctcgtgatgtttgtatggtcgataagcccgggggaacggcttcggtagaatttacggctgtgaatatcgtgaagctgaacattaccgatacgcctgaaggctggacggtgaccgccgatttgcagacgagccggatgaccgtgacggcccccgcaagtgatgactccaatgccgaaacgggaggagtcctgacgttggtcggttacgataccgacggaaaggccgtttccgccgatttgagggtcggaatcgggcggaccgtcgatctgacggggcagacggctaactgttatatcgccaactatgccaatgcctactatactttcgacggtaccgtaaagggaaacggcgaaaagattcctacggctcgggtagaacttatgtggggaagcacgtcgcatatgatcgagaacctgacactcgacgacggtcgggtttcgttcttcgtcgcggcggataagaaaggtgagtttatcgaaggaaacgcattgatcgcagctttcgatgcccaggataaggtggtttggagttggcatgtgtgggttacgcagtacgatccttcggcggagtcggttacttcggctgccggagatgttttcatgacccgtaatctgggtgccggagccggcggcaatgccacggaggacgacatatatctctcctacggactttattaccagtggggacgtccgaccccgatgatcgggccggcgtattataactgtgcatttgcggaggatcataagatgtataatatcaacgggcgtcttacttatcttgactatgtggaatccacccccgaaacgggcacgatggagtatgccatagcctatccgatgagttttattctgggagtcgaggagtccggttacgattggctctattccgaccatgacaacgagttgtggggggcggtcaagaccgtttacgatccctgtcctaagggatggaaggttccggacaaggatgtttatgccgattttatgatcggcgacgatcatgaccaggagcaaacggaggcgttgcgcgaggcttacggctggaacctgaccgacggaacgatgacttcattttttctcggaggcgggcgtcgcccttatctgacggggcttatccagaatgtaaacagcaatgcggacgcgcaaccgtggatcggatgctattggaccagcggtttgggaaccgacgaattgagcgcttcgggcctctatttttcgctcgatacggacgatgctgcttcgagtgaatttgttccggcacggaactatcaacgagccaatggtttgcaggttcgttgcgtaagggaataatatcttttttccgaatcaatataccttattttcgccggagttttcgctccggcgattttttggtataacagttgttcctcttttcggaagaatttttatttgtctgcaaacatgagagtacaaaccggtaaagggaccattccatggatgaccgtgttggcgatttggtcggtatcagcggtcgtttcgctgccgggacttgccatctcccccatcctcggcgacctgaacaaggtctttccgcgcgcgaccgatctggagatacagatgctcacttcgttgccttcggtgctgattattccttttatgttattggcaggccgtttgtctgtgaccgggaataagttcaagctgcttgtggtcggacttgcggtttttttcttgagcggcttcgcctgtcttttcattaaccaaatgtggcttctgattttggtcagttgtcttacgggtatcggtgccggtatcatcattcctttatcgacgggatatatcgtggattactttacgggagactaccgcatacggcagttgggttacagttcgtcgatcaataatctcacgctggtgttggctactatgctggcaagttatttggctaatgtcgattggcatctgcccttcctggtatatacgttgccggcgattccgttgattctttcggttttcattcgcaggactcccgctgctccggaacctgtcgggagcgatgagctgaaacacaagaaggtcgattggccgaagctggccgctgtcatgggattttatttcctggcgaccttcctgtcgttggttatcgccttctacatttcattcctggtggatccgcacggcaaccggaattctttttcgggttttctgatatctctcttttttctggctatcatgctgcccggctttttcctctctccgatcatccggcggctgcgcagcaacgtcaatctgatttcgttggttatgatctgtgcgggattgctctttatcggactcttcaaggcgcatttctggctgattgcgggatgcactctcgtaggactgggatacggcattattcagccgatcgtttacgacaaagcggctgcggcggccccaccgcaattggcgacattggccctttcggtcgtgatgtcggtaaattatctggcgatcgttctttgtccgttcattatcgacctgttgcgaaacattctgcacatgcagggagaacgcttccctttcatcttgagtgctggtctggctttcgttgcggtcttgctgacctggcggtacagaaatagctatgcgttcgggttggataagtcttattaccggcaatgaataaagaggagagccgcttaaaaagtggctctccttcctgttgccgacgttttttcctggatcgttgttgccgggcgttgccgctttgccggaaacgtccggtcgtattgtgcgctgcgtcggtccgcgatccttcttcgtgccggctatttcccggatgcgggattctttacgcaacgtaccggcatgcctgagcgacagtctatgtcgattatgtttacctggttgcttttcgagaagagcaggtattggtagttcagatcctccggagtatagaccgaactttcggtactcgtacagagcaggtaacctttggagaaatccccggacatcaacgatccgatgtatttcccgctcgggtcgcgtgtcccggcataggtgaagaaggagctgccgagctcactgttcatggcgataagcgactccagatccgcccgggtcggaaggtgccatccttccggacaaatgccttgcacgccctcgatattgcggaagttgtccgcagtaacaggttcccctacggccgtagccagatcgtagagcaaaccttgccgttggatgtattccgtgtcgctggatgcggtaaaggaggtcgtacacggataccaaatgccgttttcttcggacggggatgaggaaacgcgcttgtcctcgggaatgtagcgcaggttttccgccatccaggtcgtaccgttgctgagttgccggatgcgatacttgacgcctgcgtactccagcaggtcggaatcttccggcaggtcgtcttcgaccggagcgatcgctcctccgtcctcccagcctttgacggcgccgctgatggaggcgtggatcttattcgtgttgctgattaccgcctcgatcgcatattccgcaccggattgcaggtcggtcgcctggaatgttttggtgtgccggttgccgtcggaagtttggatttcgagttcgagtgccgcccgctgcggtacgagaatggcttcatatcgtcctgcggtcaccgttggaaagggatagatatccgtttccgccgaagaagcatcgacctgaacgcttttcgccgaaagatcgacggtcgccgtgcagcggctgcccttcagggtgacttcctcgatcgtattggcggagttgttcgtaatatcgatcacgattttggtgagcaggtgggtgaataccatattcacggccgtttggctcggtacgacgtccgtcgctgtcgctgccagcaggtccgaggcttcgtgatcggcggcgagcttctggtcggcacgaacggtgaagctcgccggagctccttccgctaggtagggatagtaagccgtaagatttgatttttcactcggatcgtcgtaccagaacaggtcgtccgaaacgaagaccgtaccgtcgaaacgcagaggcgtattttcacagtagttagcaccggatttgacgatcgtgagcccgatgcggtccccggtgtcgaaattgagccccgtaacacgggagatgctcggagcgattcggatgcgggattgtacggggccttcgacagagtcgttcttgctgctgcatcctgtcagcaatgcgaggccggataggatcaggaagaattgtttcatagcgttttcgggttaattgttttttgtaagaagtatatacaaaagtataaaaaataatatatttcgttcaatttatggaacgataaagtctgtttttgcggtgaattgggtgcttgtgatgcaataagctcgtttttttgccggtcttgtccgtaaagggaacgtccggaggtgtaattgtacgaaacagagaagcccttccgtcatcgacggaagggcttctctgttgttttttgcggttacatccgcagcgaaatgcctcctacgcagttcatgtcctctttgagcggacaccaggagagatgggtgaagagtccgattcggaaggaacccatgcttttgaccgcccacagttttccggcgtttatgaagacgtttttcacggcaaaacctttggctccgccctctcctgccgttttccagggcgcggctcctacgcccgttttcaggtcgatggttttgaccgtaaagggataggctacttcgacgtatgaggagtagcaccgccgcccccgggtatcgacatctcgcgctccgaaaaggatcgtgtaccaggagagcgtgatggggactttgcgcgatacctgccattcgatgccggcttcgatgcggtgcggggagtcggcgccgaaatggaagtagttgcggctgatctgcggattccggtccgaggccgaaccttcgtcgtaaaggtctttgaggtggaaggtgatgtttttgagccggtagctgagcatcaggtccgcctctttgtatgaactcgacgtgaaatcaaccgatccccaggccgctatcgtaaagtttcctatgccgagcgtcagtcccggttgcagactggggcccgcttcgtaaacaccgcgccagatataactgctgaccagatccatttcgacctgaagcgttacgcccggtctttttccctcgggaagtgcggtttcttccgcctttgcccgaagtgcggacaacagaagacaggggataaggagtaggaacatcatgcggttgggtcccgcgtggcgtgagaggtttctcatatcggaaatagggttaatcggctgcaaatgtagcctttttcgatggactgtgcaactgtttcgtcgggcgtgtaacggatttgaaacggttgtttgacgcttttgtaacgagggtgtagcccgggtgaaacagcggcccggtacttttgccgctgtaaaataataagtggatgaatagatttttattgattgggttattgatgctgaaggggatctgcacgacggttgcagcgccccttctgtctgttgtgaccggtacggtgcaggacgcatcgaccggcgaggcggtcatcggcgccgccgtgattttgcagaatacgacgtatggggccgtcgccgatgccgacggccgcttcgttattaataatgtaaagccgggcacttatacgatcgaagtgcagatgctctcctaccagcgcgtagtgatcgaggggtgtcagatcaagccgggagagaataccctgccgctgatttcgctgcaaccctcggccgaagagatcgacgaggtggtcgtgactaccgtgcggcggctttcgagcgaggcggccgtgatgcaggccgtccgcaactccaagatggtcgtgagcggtgtgtcgaagcagatgatcgcccgcacgcaggaccgcgatgcgggtgaagtcgtgcgacgcatacccggtatctcgatcatcgacgacaaattcatcgtggcgagaggtctctcgcagcgttataataatgtgtgggtcaatgatgcggccattccgagctcggaagccgattcgcgggccttctccttcgatctgatccctgcggggcagatcgagaacatcatgatcctgaagtcccccgttccggaaatccctgcggatttcacgggcgggttcgtcaagatcaacaccaaagatacgccgggtgaactacccttcgccctctcctactcgatcgggttcaacacggcgaccttcggccacgactttctctacaatccgggaagcggcagcgactggttcggctgcgacaacggcaagcgcggcgtgcggggtggtattacgggtgcttttgataacgacgatccggatttcgttaccgacatgacccgtcacggcttcaacaacgactggtcgatcaagacccgcaagccgattcccgaccagcggttctcattctcctacggccacagcttccgcctgggcaacggcgccgatctggcgctgaacggagcgctcaattacagctatgccacccggaccttctcgaatatggaaaactcccgttacggggtttacaacaaggtggaggacaaacccgaatactactacaaatataccgacgaccagtaccagaccaacgtcaaagtgggcgccttgctgaatctggcttacctgaacggaaagaatcgctactatttccgtaacattttcaaccagatcggacaggacaagctcacgctgcgcgaaggctggcagaatatgtcgtcgctctatatccaggagaaaacggagtattgctacacctctcgcagcacgtacagcgggcagatagcgggtgtacatactctcgaactgggaactctggactgggatgccggatattcctacgccgacaagaaccagcccgaccgccgcatcgtcaaccggcaggagaacgacatggtgggcgatgcgcactacggtcaaatgcagatcgatcagaacgagatccggcgtgacttcatgaaattgcgcgaacacatcgcttcggcgggcatcaactactcctgcaccttgcgcgaaggttcgtcgttcgcccccgaactgaaggtcggactctacggcgaataccgtacgcgggattatcgcacccgggcctatttctatcgcttcgacacggacaacctgcctgcggacttcgcttacggcgatgtgatcgacgatattttgcaagacggtaattatggcgccgacaagctctatatctacgacgacagcgacaaccgcaacagctacaagggcgacaacatcctgacggcggcttatgccggcatcgacctgcccttcggccgctggaacgtttatgccggcgtccggttcgaatacagccgtatggcgctcacctcgtacaccaagatcaaggactgggacagcgaaacacgaaactatacccatgccgatcccttcccttcggtcaatgtgacataccgcatcaacgacaagcacctgctgcgtgccgcttacggtatgtccaccaaccgtcctgaattccgcgaagtttccccttcggtctattacgatttcgacctgttcagcgacgtgaagggtaatgccgatttgaaagcggcctatatccagaacgccgatctgcgctgggagtggtatccggctgcgggcgaaggtatctcggtggccgtgttctacaagcatttccgcaatccgatcgaaacggctattctcgatgcgggcagcggcagttatacttacacgttcgagaatgccgaccgggccaatctgtacggtgtggagctggacgtgaagaaaaacctcgattttatggggatgcgcaatttctcggtggttctgaacggttcgctcatgaagagccgtgtggatttcgacgacgagagcctcgagcacgaccgtccgttgcagggccagtcgccctatctggtcaatgccggactcttctaccagtcgcccaaactgggccttacggtcggtgtcctgtataatcgcatcggcaagcgcatcgtgggcattggccgcagcgatatgagcgtgggcggcagcatcgacaacgatattccggatatgtacgagatgccgcgcaacgcgctcgacgtggtggtcagcaaatctttcggcaagcattgggagctgaagttcaacgccaaggacctgctcaacgagaaggtgcagttcgcccaattcccgaaattcgagaacggaggcgatgtggtgtcccgcaagcaaatcaccaaacagttcacggcgggacggatgttctcgctgagcgtgacggccaaattttaagtgaatcgcagaaattcgttcgggttctaccgagtgagaaaatagtcgaagtaaaatcaaccttttttaatcaaataaattatgaagaaaattttatgggcagcatgtttgatggctgcgttgagtctcgcaggatgcagcgacgacgagaacggtaacggtggcaatggaggcaacggcggtagcggcgagggcggaaatccgtccggtggcgatctgacggagatactcttcgaggacgggacccagatcggcgacggacgtcaggaattcgagatcaagggcgactacacgcttcccaaaggtacctacctgttgaaaggctggtgctatatcgccgacggtgcgagcctgacgctggctccgggtacgattatcaagggcgacaaggagactaaggcagcgctcatcgtagagccgggcggccagttgtgggctaaaggcacgcagagcgagccgatcgtcttcacctccgagatgcctgccggcagccgtcggccgggcgattggggcggtatcattctctgcggtcgcggtgtgaacaacaaggggacgatgcagatcgagggcggtccccgcactacgcacggaggcagcgacaatgccgactgttcgggtgccttgagttacgtgcgttgcgagttcgccggctatcccttcaaggaggaccaggagatcaatgccatcacgttcggttctgtgggatcggctacgcagatcgaccacgtgcaggtgtcctattccaacgacgactcctatgagtggttcggcggtgcggtgaacgccaaatacctggtttcctaccacacctgggacgacgatttcgataccgacaacggattctgcggcaaggtgcagttctgcctgggcgtgcgccatccccgcattgccgacacctcggcgtcgaacggcttcgagagcgacaacaacggcgaaggttctgccacttctcctttcacctcctgcgtcttttcgaacgtgaccttcgtcggtccggtcggtcaggatgcagcattctccaacacttccgactatatcaccacaggcgatatgaatcccaagaacggttccaagctgggccagttccagtctgccatgcaagtgcgccgcaattcgcatctgaactgtttcaattcggtggcgatgggtttccccgtcggtctgatcgtggagaacgacaaaggttcgcagacgcagactgcggcgtccgagggtacgttgaagattcagaacgtctatatggccggtatgaccgtcctgggcagcgacgtgaacaaatcgttcgaggatggtttctgcgacaacggcgacaagaacagcatcgacaagtcgaaggagtccttctcttcgacctatttcaagtcgatagcttcgaacaagtatttcgatgcgatcgccgatctgaaactctcccagcccaacagcctgcaagccaatccgaactacggtccgctctccgatagcccgctgcgcggggccgcttcttttaccgatccgctggttgccaacggtttcgatgaggtgacctacatcggagccttcgccgacgaaaacgacggatggatgtcgggttggacggagttcgatccccagaacaaagcctattaaaccgggctttcgatcaagcgttaataaaaagtaaaaagggaaaggcagcgtttcaaacgctgcctttcttctttttgttttcggtaaatccgattgtcggatcttcgacgtgaaaatgtcaggagttcggcttttttccgtcgagccattcgatgccccggtgagtggcgattccgcgcaggagagcccacccgaaagcatccatttcccgacgggttcctccttcgaggtagaggccgagcagtacgttcatcaaccgtttggcgaacagctggcagtccacatcgggcaatacgctgccgtcggcgacgcaatgttccagtacttcggtaaacgagtccagccagaaacgacggtttttttcgtaggaatcggcataggaaaccttctgttgcaactcctgaagcgaaatgcaactgatcatacatacagcggcaatgtattcttgaatcagattccgggcctgttcgagggccgaaccgggttgataaaagaggtagcctgcgatctttttctcctgttcttcccggattttgtcccagcactgttcgaccagggtgtccttatcgctgaacagttcgtagagtgtccgcttggagatctccagcttttgtgcgatctcatccacccggacggcacggatgccgttccggatgatgaggtcccgcgtcgtgcggatgatttcttcgcgtgttaccctgcgtttcattgttatttatcggtttcggattcgatttcacggccgccgcccagggcatggtagagatcgacgatagcctgaatctccgagaaacggtcgttgatttgcgacagttgtgccgacagcagggtttgctgtgcagtcagcacttcgaggtacgtcgtgctgccgtggcgcatcagaagctgggtgctctcgacggcagtttccagcgaagcgacctgtttctggcgcagatcgactttggagcgtgccgactggcatttggcgagggcgttgttcacttcggctcccgcgttgagcagggtctgctggaacgacagtagggcctcctgctgttgcgctttggcgattcgaagctgtgcctggtttctgcccgcgttgaagatgggctgtacgagcgatgccgcagcgttgaagatccatttggcgggatcgagcgtcgtaacacctccatcgttggtccaacccagcgtaccgctcagactgagggccggatagaacgccgaccgggctccggccgtgttgtaaaaggcctgtgccagcgagtattcggcatttttcacgtcgggacggttggagagcatctgcgcgggaatgccgaccaccagattctccggaagaatttgctcgtcgagcgtgccgcgttcgaagctgcggggagcttcccccagcaacgacgagaggctgttttccatttcgcggatctggtactccaggtcgaacagcgaggattcgatcgaatagtagcttgcttcggcttgagaaaccgccgcttcgttggtcatacccgcctctttcatggcccgcatcgtattgacggtttcgagccatttttcagcggtttctgaagatatctcgtactgagcgtcgagcatcagcagcgtgtagtagagattggcgacggaggcgatgacctgcgtgcggacagcctgttggtactcctggctttgtgcgagaagagctttcgcccggcgcttgctgttggtgagtttgccgaaaatatcgacctcccagctggccgttgcgggaacggtgtaggtccacgtggcgttccaagggttggtcaggctgctcacgcctccgttcggagcgaagttgaacgagggcaggtatgccaggcgtgccgacttcagcgtcgcttccgcctcttttacgcgccagtaagccgactggaggtcggtgttgttgtccagtccctgctgaatgagctgttgcaggtagggatcggtgaacatctcctgccaggaaatgttacccagggtcatcgtatcgaccgtttcgactccctggccgtaaagcccgtcggttttgatctcttccgggcgcgtgtagggcttgtaaatgccgcagccagccatggcggctgcggcaagtatgatgattagctttttcatggtttacttcttctcttcgttttcttttttgctgtcttcgatctcggcttcgatcatccagtcgggagtgttcgtgaattggatcggtttgaccttctcctgcaggtgctggaagacgatgaacagggacggcacaaggaacaacagagccaacgtaccgacgatcataccgccgacgacgcccgaaccgagggtcgagttaccgttggcgcccacacccgttgcgattaccagcgggatcataccgaacacgcaggtcagcacggtcatcaggataggacgcagacgggctttggcggccgagaaggcggcctgcgagaggctcatgcccgacttgcggcggtctgccgcgtactccgtaatcagaatcgcggttttcgacaacagaccgataatcatgataagacccgtctggaggtaaatgttgttctcctgtccgatgagcttgaccagaatgaacgaacccagcagaccgcacggtacggccagaatgacggcgaaaggaatcaggaagctctcgtaaagagcactcagaatcaggtagatcaggatgatgcaaataccgaagatgatcgccgtgttgctacctgtctgactctcctcgcgcgtaagtccgccgaagtcgtagccataacccttgggcagcacctgttccgctacctcctcgatggccttgatcgcatcgccggtcgagtatccgtcggcgacggtaccgctgatggcgatactgttatacatgttgaagcggctcaatacctccgatccatataccttggtgagcttgacgaactgactgatcggtgccatttcgccgttctgcatccgcacgtacacgttgttgagcgattcgggatcgagtcggtatttcggatcggcctggatcatcacgcgatatactttcgagaagcggttgatgttcgacacgtactgtccgccgtagtagcccgaaagggtcgaaagaatctctgtcggagagatacccgcgcgcttggccttcgccgcatcgatgtccaccatatactgcgggaagttgatgttgaaggtcgaataggccatctggatttccggccgttggttgagcgcatagatgtattgcaaatagatgttgtagaagtccgttatgtcgccgcccgtctggtcttgcagatacatttcgaaaccggtcgaagtaccgtaaccggtgatcatcgggggagcgacggcgaagatctgcgcgtccttgatgtcggcggtccgggcatagatttggccgattacggcattcacggcgtcggccttgtcgggacgctccgaccagtctttcagtctgacgatgcacataccgtacgagtttccctgtccggcgatcataccgtaaccggctacctgctggaagtcgcggatctggggaatgcttttcagacgctcgcctactttgcccattatcttgttggtttcggcgagcgagctacccggagccgtcgttacgttgatcatgatcgtaccctggtcctcgtcgggtaccagaccggttttggtgttgttcatcagcagcaccagcccgatcattgccagacccagcgttgcccaggtgagccatttgtgcttgatgaataccatgacaccgcgctggtatttcttgagcacggcgctgaaggccgtattataagccttgcggaaccgggccgcgaagttgttcttcacattgccgtcttcatctacatagggtttgagcaacagggcgcagagcgccggggaaagagtcagtgcgttgagtgcggagataccgacggcgacggccatcgtgataccgaattgcgtatagaacgtacctgaggttccgcccatcatcgacaccgggataaacacggccatgaagaccagcgtcgaggtgatgatggccgaagtgatgccgcccatggcatcgaccgtagccaggtacgatgacttgtagccgctgtcgaagcgtgcctggacggcttcgacgacgatgatcgcgtcgtccaccaccgtaccgatggcgagcaccagcgcgaagagggtcagcaggttgatcgagaagcccgcgaacgaaaggaaagcgaacgtacccaccagcgacacgaggatcgaaatggtcgggatcagcgtcgagcgtatatcctgcaggaagacgtaaaccactaaaatgacgaggatgatggcctcgatcagggttttgatcacttcgtggatcgaggcgtacaggtagtcattcacgctcatcaagtgggttatctctacgcctttagggagttcggttgcaatttcatcgagcatcgcgtcgatttcctcgacggtttgtgtggcgttcgtgcctgcggtctggaagacgagcgccgaaacgccgggatgaccattgaccataccgtgataagcataggagtcctgtcccaattcaatgtctgccacatctttcagacgcagtacctgaccgtcagaagtagctcggattacgatctccccgaactcttcaggtgtcattttacggccacggtatttcatggtatattggaacgtgttatctgagttctcgccgaacataccggctgccgattcgatgttttgttccgccagaacgcctgtaatgtccgaaggaatcaacttgtactgggccatgacgtccggcttcatccagatacgcattgcataatcgccaccgagagcaaagaattctccgacgccctggatacgctggatgcgcggtttgatgttgatattgaggtaattcgacaagaaattttcatcgtatgaatcgtctggactgcttagcgtgaaaactttcagcatcgaagactgacgcttcatggtcgtaacaccgatttttgtaacttcggcagggagcgatccggttgccgtcgctactttattctgtacgttgacggccgccatatccgcgttggtgccctgtttgaaataaaccgtgatcgatccgctaccggcattcgatgcttcggatttgatgtacatcatattttccacgccgttgatagcctcctcaagcggaatgatgacgctcttctggatggtttcggcgctggcgcccggatagctggcacgcaccatcaccgtcgggggcgcgatgtcggggtactgctcgacggggagcgtcgcaacaccgataataccgcccaggacgattacgatggaaatgaccgccgccaataccgggcggtctatgaaatgttttagtgtcatattttactgctcttttgtaggttgttctgcaggagcggtcgcggtcgttgcggctcctttgggtttgatcggggttccttcgcgcatcagaccgacgccttcggtcacgatgacttcgcccggggtgagtccggcggtgacgatgaaattcttgccgtcgctctggggcgatacggtgatattctgcgaggtggctacgccgttctcgaccttataaacgaatttcttgtcctgcaattcgaaggtagcgacttgcggaacggtgactacgtttttgtagatgtgcggcaacaggacattacccgagctaccgctgtgaagcaagcgtccgggattggggaatacggcgcgaagctgtacgctgcccgtcgaagtgtcgatcacgccgctgatcgattcgatgcgtccctcctgggagtaaagcgatccgtcgttgagcacaagctgcacgttcggcaacgccgccagcgctttgtccatcgagccgtattcacgggtcaggtcgagcagttgattctccgtcagggagaaataaacgtacatatcggagttgtccgatacggtggtcagcggttggggaatcgatgcgctcaccagggcacccacacgatacggcaggacaccgactacgccgttggacggacttttcacttcggtataggagaggttgttggccgcattgacgagctgtgcctcggcctgtgccaactgggattttgccgtcagcaggttgttctgggaagtttgcaggtcgaactgcgaaacgacgttcttggcgaacagctcttttttgctgtcgtaggtcaattgagcggtggctacgctggcctcggcagctgcgacgttggcttttgcggtttgcagggctgccttgtagggcacctggtcgataatgaacaacaactgtccctggcgaactacttcaccctctttaacgcacactttggaaatggtacccgatacctgcgggtaaatggcgatgtcctggcgcccacggatggttgccgagtgggtgctcggaatcgttacgtccgatgtcgaaattgtcatgacggaatattccgcctcgcctcttgccgtcggagcctggccgcacgatacggcgaaagccatgcagcttccgaacaagactgcctgaattaacttctgcttcatagttttttggttgattattattactttgaaaaaatattttcccgttaaaaaactttttgtcatgcaaaagtaccgtaaaatttaatgtgtaactttctttcttgcgaataatattgtcacttttcggtatatttatgccatatttgtacgataataatatcaggggcttttcgtttgtccaaaaaagaagaaatcattatgtccgcagcaaaccccatagctgtttccgaagaggaaccttttgttatcggaaaatccgatctcgcttatttcttcaataatccctgccgttgcgattgcgcactggttctgctttgtacgagcggtcatgcccaggtgaccgtcgatcttcgccggggacctttgcagctcaatacgatcgtactcttactgcccggcagcgtattgatgttcgacgatgcgtcggccgacttttcggtgaggttcggcgccttctctcccgacctgttcggggaggccggatttcggctggggctctcgtttttcagctttttgaaggaaaatcccatttctcaagtaaacgaaaggatggctgccggattgtctacctggttcgaaataatggattacacctatcaggatcggggtaatatgttccgaaagacgatcgtgagaaatcggttgcagaatattatgctggagctttacgataagatccagcgtaaggtcagcagccagtgtcccacgacttccaaccggcagatggagctgtttcatcgctttgtttccctagttcatgactgttgtatcgaagagcgtgaggtttctttctatgcggacaagctctgtatctcgacccgttatctttccgccatcgtgcgccggacgacgcatcaatcggccaaggagttgatcgataagatcgtaataatggaaataaaagtattgcttcagaacactaccctgcccattcaggagatcgcttataaaatgcatttcccggatcagtcttatttggggcgttatttcaagaaacatactgggatctctccatcggctttccggcaggagagccgatagtttgccgacaagttgcccggaacgattttacgggcggtcgcctcgcttcacccgtgctgatttttcagtgcgggtgaagcgtttttatggacttccactacggagctcgatgtagttctgtggctgggttacgagtattccggaagaccgggttcgggtcattttgaaatgtgggcatcacccctcccctcgatcgtgtacaggctatcgtacgcttcacggcatgcaacggcaggtattgcctctgctttttgcgaatgtattttcttttcttcggaagacgaaaggcggaacctgtccgtacggctgtccgttcccccattttcggataatgttttgtctgttagcaagttgcataactataaacatagcaaataagttatggagttttatagatcagtatatgcagacgcctaatgaaaaacttcccgtaatataatttattatattcgagttcatttcaatttctttacaaaatcggtatttttgtttgtggtattaaaatgacttgtcgttatgaaattattgatcgtggaggacgaatcctcattgcgtgagttgctggcacgtgcacttcgcaaagagcaatatgtcgtggaaacggccagtacatacgccgaggcttcggacaaattggcagcctattcgtatgattgtatcttattggacattatgctgccggacggcaacgggttgcaacttctcgagcgtcttcgaagagcggataaacgcgaaaacgtaatcattatctcggctcgggattctttggaagacaaggtcctcgggctgaaagaaggtgcggacgactacctgcctaaaccgttccatttggcggaactctcggcgcgtatccagagtgtcattcgccgtagtcgcggtggcgggaaaggcggcattgcgctgggtaatgtaacgctcgacccggaaagttgccgagtggaaatagacggcaaggaggtcgctttattgaaaaaggagttcgatattctttcgtatttcatgcagcgtccgcgtcatgtggtcgataaggcagttttggccgaagccgtatggggggatcatgtcgatcaatccgataatttccatttcgtttattcgcaggtcaaaaatctgcgccgcaaactcgaagaggccggagcctcgatcgaaatcaaagctgtgtacggtttcggttacaaactgattgattaagcaatgcatttatgaaattgatctataacatatcgcttcgtttgtcgctggtcttgttcccgctgatcgctttatgggcggtcgtgttttattttaccatgatggacgagataaacgatgaagcggacgatgctctcgaggattattcggaattgatcgtaatgagggtgcttgccggggagcctttgccccgttcgaacgaaggttccaataacagttacacgatcatccccgttgaatccggatacgtcgccacccgtccttcgatcgactactacgataccgaggtgtatattccggaaaaggatgaaaccgagccggcccgggtgttggcgactatttttcaggataaggacggtaatttttatgaactgaaggtggctatgcctactttcgaaaaagacgatctgctggaaacagtcatgtggtgggtcgtgtggctctatcttttccttttggtgacagtttccggaacgaccttgtgggtgttccataaaagcatgctgccgctttatgagttgttgcattggttggatagctatgctcccgggcgcgaagtcgcgcctgtgccgaacgatacctctattaccgaattccgtcgattgaatgttgcggcacagcaggccgtggatcgctccgaggagttgttcgagcgtcaaaaacagtttataggcaatgcctcgcacgagttgcaaactccgttggctgtacttggcggacgtatggagtatctgctcgattgtgcggacctggacgaggaaacgacgggcgaaattattcagatgcggcgtacgctcgaccatatcgtccggctgaataaaacgctgttgctgcttaccaagatagataacggtcagtttccggagagcaccgacatcgatctcgttcccctggtcgaggagcggaaggcgctttatgacgatatatacggagagcataaaatccgttgtcgtctgcatttgcccggtaccttctcggtccggatggatgaatcgctttgttcgatattggtttccaacctgatcaagaacgcctaccttcacagtgccgacggagccgccgtagatattcgtatcgagggaaatgtattgacggttattaacgacggagtatcgccgcttgatgagaaacatattttcgaacgcttttatcaggggtcgcaaaaagaaggctcgacagggctcggtttggcactggtcaaagccataacggattattatcgcctcggactaatttattacttcgaaaatggccgccaccattttggcgtaagctggcgataattgggacgacgatcagctgcattcgaatatgacgactgttttttgctgatttcggcgataaccctctgttaccggttctgactctgtccgaaatccctttctcggaggaaagtcgaagcatatcggccggtttcggatcggggtatcgaaatatataatcgggttcggaaaaaatattttgttaaaatatcgaaattccaaattcgctccaaaatcggttctcaattttgtaccatacaaaccgatcgggtgatctcccgataaaaaatattgagaaaatgaagaacacgagaaaaatgatggcgtttttgatcggcatcacgctgctgacaatctcgccggcttatgccgatcacgaccgtgcggtcacaaccgaacagatgccgcgacaggcgcaagagttcattgcccggtattttcccggtgaaaaaatcgcctacgcaaaaaaagaaagcgattttttcgaagtcatttacgaagtgatgtttacgaacggcagcaaggtcgagttccgtcgaaacggagcgtggaaagaggtggattgccgttattcgtcgttacccgcaggaatcgtttcgatgccgatcgaaaccaaagtacaggagctgtatccgggtgctgcggtcatcaaaatcgaacgcgacaagcaggaggtcgaggtcaagttgaataacggaatggagctgacttttgatcgaagtcataatttgataggtatcgacgattgataccccgtccgtttccgataaagatttttcaggctgtgatttcgcagtacaaattattgataaacatttaagtaaacgaaacaatgaatacgaagaaaaaaacattatctgttttaacaatggctgcgacggctctcctgttcgctgcgtgcgacaaggatgaagtcggaggaccgggcgactcacatatttcgcaggaggtattggcggcttttaacgctcgttatccgggtgcccaagatgtacgatggtcccttcgaggcgactatgctgtggcgaactttttcttcgaggctgcccggacggaatccagggccaacaatgcggcatggttcgaaaatgcaaacggacaatgggccatgaccgaaacgaatatcgacttcgcggcacttccgcaggctgtccgggaaggtttcgatgccagcaaatataccgaagccgaaggatggacccgtactggtaaggtggataagctcgagcgcaaggaggtcgtcggggccggtggcagcgagggtgtgaccgttgtctatgttatcggcgtcacccgcacggcagacggcataacgaccgggatggacctgtatttttcgaccgaaggcgtattggtgaacgaagtaaccaatgctgcggatgatggttatgaagactatattccagagaaacctgcggcgggtatcgaacagcagattcaaggttacctcgatgataacggcggaggctcggtgatagacgtggaccgggaatacggaggtacggaagtcgagcttgtttgcggcggttacaagcatgaactctatttcgatgcgcaggggaaccgcatctatgcaaagatcgaatacggacgtcgggatattggttcggccgtgccggaagcgatttacaatgcggtagcggccgaccagcagctgtcgagccccaacgatatcgacgacatcgaaaaatggtcactcgataaggctacggcagacggaatcagcgttttctggtgtgtcgaagtggagacacggcataaagaggtagatatttacgtaaacgattcccctgttcggatcattccccgtcctgtaatagatatgggaaacacgggaggtaatggactgccggtagaggatgagatcgagcgcttcctgaacgatcgttatccgggagctaaggtcgtggaacgcgactatgatgacggatgtcttgaactgacgattcttcacgaaaatctcaggaaagaggtgcttttcgacggtcgcaacaactggctccgcaccgagtgggagctccaccggttgccgcaaaatattttggatgcggtgcagcaggctggctataccctcgacgacgacgaatttgaatgcatcgaaacttccggcgggatgtggtatgagttcgaagcacgaaaagaccgtcgagagtatgatttgcgtgtggatacgaacggaaatatcgaggcctacgaagattgatggatcggctagacaacttttgaatttttgtatggctaatattcacttgattaaaatcaatgtattatgaaaaagatgattttagcagtggcattgttgcttacaggcatcgtgtcggcccaggccgacggacgcgagaaaccgattacgatcgacaaccttcctaaagccgcgcaggagtttctcgctacgtatttcaaggatctgaccgtagcttatgcggttgaggagagcaaatacttcggttcggaatatgaggtgacttataccgaccgcacggaagtggaattccgtgccgacggtcagtggtcggcggtcgatcgtaaatattcggccgttcctgcggcgatcgttccccagcagatcgcggatttcgtagcgaagatgaactaccccggtcagtttatccgcaagatcgaccgtgatgcctattcgtgggaaatcgaactgtcgaacggattggaagtcgaattcgatttgaatttcaacgtcatagactatgatgactaaaattcccgaagttttgaaatccggctcgggaaaaaggtgggtatggatcacgggtgtcgttgctatattcgctctactctttgcaatcgcatggaatatagagtgtgaaagagccgtagcgccacaggaactgcccggtgaggcccgctcttttatcgcacagcattatccggaagagaatcccgttttggtaatcaagacgctcgacgaacttgcagttacgtataaagtcgttttcgccgacggtacccaagtgaaatttcgccgaaatggaatgtggcgagaaattaaaagccgttcgcgggcggttccgtcggctgttgttccggcgcagattgcggattacgtcgctcggaactttccgggaaccttcctcgtcggaatcgagcatacttgccgggaatgggaagtgaagttgaacaatacgatcgaattgaccttcgatgacaagcgtttcgcgttgaaagagtacgacgattgatcgatatattgttccgctttcccggaaatggggagtatattattgggaggtaaaaaccagcttccggatcggaggctggttttgctttgtggatgttatttccgattgctgaaaagtgtcgggtatttcgcttttcgaaaagcggttgcggaatgtgtatcgtttactattgcggttgcgagttgttacgcagtgtggttcagacggatttttgtttcccgttccgaagaatccaagggggcgacggtttatcgctgcaaatggtcgtgaaatcgggttgcagccatcgatgtatcggaggtgttcgtcgaataatttttaagctcaatatagaaatcggttcttgcgggatggaggatgcttgcggaaaggttaaaaccaagccgcccgggaaggcggcttgagaaaaatggagagttaatttagttggaattggtcgtttatcgtaaacttccggaaataaaattaagaaaaatttttcgaaaaataaaattgttgcgagaaaaaaatatcgatacactccccgaaaagaggagtgtatcggctttaggacgtattctggtgtttcagagtgtatgcaaggaaggaatcaacctccgatctcgctcaattccagccatcgcatgcttttggtgtcgatctggtccatgagtgccgtgatccgctccgaaagcgccgtaagctcttcgaacggcaggtcgccggacgagagtttttcttcgatcgcggctttctcctgttctaattccggtatttcggcttcgagatgctccatctcccgtttttcctggaaggtgagcttgcgtgccgctcctgtttttgccggggccgtcccggacttccggatctccccgcccctgcttccggatgccgtgctcttggctttttcctgggcgacggcagcctgtttcgccgcttcgtagtcgcgtttccaagcggtgtagtcggagtaggtgccggcgaattcgcggatctccccgcctccgcagaagacgagcagatggtcggcgaccttatcgacgaagtagcggtcgtgcgaaaccacgatcacgcaccccttgaatgcttgcaggtactcttccagtacgccgagcgtcacgatgtccaggtcgttcgtaggctcgtcgaggatcaggaaattgggactctgtatcaggatcgtgcagaggtataaccgcttgcgctcgccgccgctgagccttgcgacataactgtactgcacctcgggcgggaagaggaaatattgcaggaattgcgatgcgctcatccggcgtccgtcgcccaggtggatttcgtgggcgatgtcggttacgatgtcgatcaccctctttccctcgtcgaagtccagcccttgttggctgtaatagccgaagcggacgctttcgcccacttcgatcgtgccgctgtcgggctgtatgatgccggtgagcagcttcaggaaggtcgatttgccgcagccgttgtccccgacgatacccagtttgtcataccgggcgaagttgtagttgaaacggtcgaggatcaccagatccccgaaacgcttgcagagctctttggcttcgaatatcttggtaccgatgcgcgtagcctgaacgtcgagcttcagcgacgcctgcgtgcgggtgcttttcagcctggcgtccagttcgtgaaaggagtcgatgcgggctcgggctttggtcgcccgcgcctggggctggcggcgcatccactccagctcgcggcggtagagattcaggtcgctctcgcgccgggcttcggcggcctcggcccgctcctgcttcttctcgacgtagtaagcgtaatttcctttgtataagcagaccgaccgttggtccacctccaggatgtcgctgcacacccggtcgaggaaatagcggtcgtgggtgaccatcagcaaggctgccttgtttcgcgtgaggtactcttcgagccattcggtcatgtcggtatccaggtggttggtcggctcgtcgaggatcagcaggtcggcttcgctgatcagcaccgctgccaatgccacacgtttgagctgtccgccggaaagctggcctatctttttgtcgaaatcgttgatctttagtcgggacagaatctccttggcccgctgttcgtagtcccaggcagcgagggcgtccatacggctcatggcctcctgcaacccgtcctgcgcaggatcggcgacggcttgttcgtaggctgcgatggctcgcaaggccggattgtcggaacggaaacaggcttccagtacggttagatccgcagcatattccgggttttgttccagataagcgatacgcaggtcacggcggggcgtgatcgttccgctgtcggccgtatctttgcctgcgagaatattcagcagggtcgttttaccggaaccgttgcgcccgatcaaagcgatgcgctgcccctcgccgatcgtgaaagagatattgtcgaaaagcaccagatcgccgtacgacttggtcagattttcgacttggaggtagttgatcattctttgtgcgtcggtttagatggacagtttctctttgctttcattcagtaggttgcggtattctgtcacgatgtcgtgcacgatttctgccgcagtttgctgctcgcggaaaagcgaggccacctgccctatttcaagctctccgttatcgaggtcgccttcgaacataccttttttggcgcgtccttttccgagaagcgttttcagctcttcggccgtagctcctcggttctcggcctcttcgacctcgcggaagaaaccgcccttgaccaagcgcgtgggagaaacttttttgagcatcagcatcgtatcgccctcttccagactcaggcagcggtttttgaagttttcgtgtgccgagctttctgcggcgaatgcgaagcgggttccgatctgcgcgccttcggccccgagggtcatggctgccagcatcccggcgcccgtagcgatgcctcccgcagcgatcagcggcagcgaggtgacacgtcgtacggccggaatcaggcataaggtggtggtctcttcgcgtccgttatgaccgccggcttcgaaaccttcggctacgatggcatcgactcccgcctcttcgcatttgcgggcgaatttcgaggaggaaaccacatggacgaccgtgatgccgtgcgatttgagaaagcctgtccagagcttcggatttccggccgaagtaaagacgatcttgaccccttcgtccactatcagttgcatgacttcatcgagttgggggtacatcagcggtacgttgatgccgaacggtttgtcggtcgcctgccggcatttgcggatatgttcccgcagtgtttcgggatgcatggagcctgctcccagcaggcccagtccgccggcgttgcttacggccgaggccagccgccagccgctgcaccacaccatgccgccctgaacgatcgggtattcgattccgaagagagtgttgattcggttcatagtcgtcgttttattagatgtgaccaaagatacgcagatttcggcgtttctgcaaccctgctcccggttccaaaaaagcggacagcccgaaagagccgtccgccggataatatgctgcggatgcgtcgcttacatgccgaaggcgaacgctccgatcgaatcgtacactacactggcgatacccaacaacagcacaccggcagtacagagcgccaggctcaaacgggttccccgatcgctgcggaaggtcgggatggggtgttcgccgggggtgatgaacatggctttgaccaccagcaggtagtagtagagcgagatcaccgtgttgagcagggcgatgaaaaccagcagatgaaatccctccttgaaagcggccgcgaagatgaagaacttcgagaaaaagcctgcgaagggcggaatgcctgccagcgagaagagcgagagggtcatcagcacggccagcttggggttggtgcggtagaaaccgttgtagtcctcgatgcaaactttcccgtccgtatgttgttcgacggccgaaacgatgccgaaaatcgacaggttggctgccatatagaccaggatgtagtaaaccagcgaagtcatgcccagggccgaaccgccgatcacgcccagcatgatgtagcccgcctgcgagatggatgagaaggccaggaagcgtttgaggttctgctggcggatggcgaagaggtttgccaccgtgatactcaggatgatgactacgaacaaaatcgttcgccactcctgcaccatcggtgcgaaaaccttgattagaatggtcatcagcacgaaagcggccgagcctttcgatatgaccgaaagataggaagtgacggtcgtgggcgctccctggtaagcgtcggccgtccagaggtggaacggtacgagcgagagcttgaagcctaaaccggagaagaagaacaccagcgccataatttgaagcggtgagccgtccagacgaatgtcgtcgaaatagagcgtaccggccgtgccgtagatgaacgagatgccgtagagcatcagaccgctcgaaaacagggcgcagaggatgtatttggcgcccgcttcggccgagttgtggcggtatttgtcgaaagcgatcagacaggccatcgggatcgatgccagctccattccgaggaagaacatcaggaagttgcccacactgatcatgaagtacatgcccagcagcgtggagagggtcagcagatagaattctccccgtttatgggcggtgtcctcgcgccgcagccattcgttcgattgcaggaagacgataagcgtgccgatagccagcatgcttttgacgatgctctgcatcggttcgtactggtacataccgccgaacagctgccccgagtccggtgtcggaacgatattgacgaggatctgtaccgtcaggaggacgcaggccagagggtggaaatatctgcggagccgctccggagcgaacaggtcgaacaggaaaagcagcgcgatcgtgacgatgagcgtcaattcgggtcgcatgaagtggaatatttcgctgtaattcatagtcggattagttcattagctgtgagatgatcgtggaaacgctgccgcttaccatatcgctgatccagagtggcatcgtacccatgccggcgatagcggcgatcaggcagatgaccgtgagtcgttcgtcccacgtggcgtcggtgagtttcaggtgcgcctcgttgcggcaggtgccgtagaggatgcggccgatgacgcgcaggatatagaccgccgtaatcacgatcgatgtgcaggcgatgatcgtcacgacgcggtggaacgtgtcgttattcatgaaagcgccgttgaagatcgtcatttcggcgacgaaaccgctcagacccggcagtccgaggttcgccagacctgcgattacgtaccctaccgccaggaagggcatcaccttcatcaggccgctcaactcgcggatgtcgcgcgtgtgcgtgcggccgtagatcataccgatcagggcgaagaagagggccgtcatcaggccgtgactcagcatctgcagaatggcgcccgtgccggccgtagtattcatcatcaggatagcgaacaggaccagtccgcagtgcgatactgaggagtaggcgttgatatatttgaggtcggtctgcacgcaggccgagaaagcgccgtacacgaccgaaatcgtcgtgaggatgatgaaaatccagctcaattcgtgcgccgcttcgggcatcaggtacatcgccacgcggaagcagccgtagccgcccagcttcatcagcacgccggcgtggagcatcgacacggcggtcggtgccgatgcgtgaccgtcggggctccaggtgtggaacgggaagagggcgcccagcacgccgaagccgacgaagaccatcgggaaccagatgtactgttgcgagaggggaatgttgtgcagcgcggcgatctcgtgcaggttcatcgtctgcgccccggcaccgaagtagatgcccaggatgccgcagagcagcagggccgacccgcccatgagcatcagcgtcagcttcatggccgaatactccttgcggccgctgccccagacgccgatgagcaggtacatcgggatcagcgccacttcgtagaacatgaacatcgagaagagatcgacggtgatgaagaatccgaagacaccgaccgagagcaggcagaaccagaggaagtaggctttgacgtcgctcttcatctgccacgaggcgaacgtgcccgtgaagacgatgatggccgacagtagcagcatggctaccgagataccgtccacgcccactgcgtaatggatgttgagcggagcgtaccagacgacgctgtccgtaaggagcatcgcgtccgtagcgcctgcttcccgcaggccgaggtaatggaacacaagataaatcgccagcgcgagcagtgccgaggagccggcgaccatgacggcatggatctgccgcgtatttttcgaaatccacagccccagcatcatcaccaaggggatcagcggaaacagagaaagtatattcatagcgttcggattatcggaggatgagtaataaaagggtcaggccgagcgtcccggcaaagaaccagatgcagtagcgctgtacgctgccgctctgcatgaagcggatccccagtgcggcgctctgggttgtccgggccagcaggttcatgaagccgtccaccacgtgacggtcgaaccaggcgatcggacgcgaaatgcagccgaagatgatccggtgcgtgacgaactgatacgcctcgtcgatgtagaagcggtggtaggccgccttgtgcaggccgctgaaggtcgtggcgagccggtcggcgacgggctgtttggcccgcaggtacatccaggtcgccagggcgatcgcagcgatggcgacggtgaggctgatggccactaccccgccgtcgaggtggatcgtataggcttctccgtcgctcgatatgaaatcgccgaagggaatgaatcccgcgacgcaggtgatcacggccaggacgacgagaggaacggtcatcgtggccggagcttcgtgcggcgtgtgatgtgcatgcagttccttgttctccttgccccagaagataccgtagtagagccggaacatatagaaggccgtcagtcctgcgatacccgtcatcacccagcccatcagaggactgaatgcgaagcaggcggtcaggatctcgtccttggagaagaaaccgctcaacggccagataccggcgatggccagacaggcgacgaggaaggtgatgtgcgtgacgggcatgtatttgcgcatgccgcccatcgccgacatctcgttggagtgtaccgcgtggatgatgcagccggcgcagaggaacagcagcgccttgaacatggcgtgggtgaagaggtggaacatcgaagccatgtaacccagtccgcccgtgtggggatcggatgaggtgcagacacccagcgccacgagcataaaaccgatctgcgagatcgtactgaacgcgagcacgcgcttgatgtcgctctgcacgcaggcgacgaccgccgcatagagcgcggtgaaagcgccgatgtaggcaacccagtgaagcacgtccggagcatagccgatgtagagcgggaacatgcgggcgaccagatagacgcccgcgacgaccatcgtcgccgcatgaatcagggccgatacgggggtcggaccctccatggcgtccggcaaccagatatggagcgggaacatggcgctcttgcccgctccgccgatgaacataagtccgagggccagcgggatcattgtcccggcggcggccagcagttgtgcgtcgggcgtgaaggagaatgtcccggcataatagccgtagaagaggatgccgatgaggaagcccagatcggcgaagcgggtgacgatgaaggctttcttcgatgccgcgatcgcttcgggcttggtgtagtagaagccgatcagcaggtaggagctcacgcccaccagctcccaaaacagatacatctggaagatgttggtggcgaccaccagtcccagcatactcatcgtgaagagcgacaggaaggcgtaataacgctggaagccccgctcccctttcatgtagccgaacgaatagatatggaccatgagcgacacggtcgagatgacgacgagcatcatcaccgagatcggatcgagcaggatgcccatatcgatatgcagcgtctggctgatcgggagccaaacggcgttgtagggcatcagcgtcgggaaaatgccctccgcgttacgcccggcgccgaaatagagaatggccgtgaggtagctcaacacggtgaccgcacccagcacgaccgtaccgatggcgcccgccgctcccggtttgagtttggtgccggccagtccgagtaccaggaaactcaacagcggcaatacgagaattagaatggtaaaatccatagtcgatgcgttttaatccgttaccatttgagtttcttcaaatctttgacctggatgtggcgcaggttgcggtagatgttgatgatgatggcgatagccacggccgtttccgcagcgctgatgccgatggcgaacagggcgaagaagaagccctccaactgacccggaaacaggaaacggttgaataccacgaaattgatatctaccgaattgaggatcagttccaccgagatcagcatcgccagcaggttgcggcgcgtgacgaacccgtagattcccacgaacatcatgatcgtcgaaacgatcaggtaatactccatgtgtatcatagcagtaatttgttttgtacactttccatcgaccgcatcgctttgccgcagccttcatgcacgacgtttcgctgtttcctcgccccctgcccggctcctccgccggaggagccgttatacggtaaaatggacgaatgcggccggtctctcttttttattctttctggtacctttttattatcgtttgcgggcgatcaggataccgccgacgatgcaggccagcagcaataaactgatgacttcgaacggcagcaggtagccctgtttttcgggactcatcaacgcgaatccgatctcccggacggccagttcaccgtgctcgaagtgttccggcaggaactggtggcgcagggtgacgaacaggcagatcgccagtcctgcgagggttgccaggatgcccacgacgaatttgtagccgcgcagtttttcggccttgtctccctcggaagaggtcagcaggatcgaaaagacgtatagaaccgtgataccgcccgcatagataagcagctggacggcacccaggaacgaatagttgagctggaaatagatgcctgccgtgccgaagaggacgaacagcaggaacgtcgccgcacgcaggatgcgtttggtggttacggccagtacggcgctcgccagcgtgaagacggccagcacggtaaagacgatcaggtcgagtgttatctccatgacgttatttgttcagggtttttactaatttgtcgcgggtatagaccgcgtgttcgaaagccgtgtcgaaacggatcgcgtcgtgcggacaggcgttcacgcacaggtggcagaacatacaggctcccaggtcgtattcgtatttgaccagacgacgccggggcttgcccgtctcttcgtccgtgacggtttcggtggtgatctttatcgtaccgttcggacaggctgcctggcagagtccgcaggcgacgcacttgtttttgccctcggcgtcgtggggcatcgtgagcgttccgcagaagcgttcgttcattttgagcgtcgcccggttttcgggatactgctccgtgattttcggggtaacgaactctttgcccgttaccttgaggcccgtgagcagggtgcggatgccgtgaaagagtccttggatataatttgccatacttaaaaatgcagtttgaatacgacgatgacgaccatcagcagcagattgaccagcccgatcggtaccaggtatttccactccagcgtcagaatctggtccacgcgcaggcgcgggaaggtccatttgatccacatcagcagccagatgacgaagagcgtcttgccgaagaaccagacgaagcccggaatgtagtccatgacggtattgaaaccctcccagccggagatgtgcaacggcatccagccgccgaggaagatcgtggaggctacacccgcgatgatgaacagattgacgaattcggccacgtagaacagaccgaaatgcatacccgaatactcggtgtggtaaccggccgtcagctccgattcggcttcgggaaggtcgaacggcccccggttcacctcggcgttgccggcgatcagataaatcacgaaagcgatcatggccgggatgtgccccttgaagatgaaccagccgtcggcctgtcgggcgacgatctcggagaactgcatcgtatcggtcagtacgatgatcgtgaggatcgagagtccgatcgaaagctcatatgaaatcatctgcgcaccgcttcgcatggcgccgatgagcgagtacttgttgttgctgctccaccctgccagcaggatgcccacgataccgatcgacgaggcggccatcatgaagaagacgcccacgttgaagtccaaaatctccatacccttattgaaaggcaggcaggagaacgccagtaccgaggcgaggatgacgatgtacggtgcgaggttgtagaggaacttgtccgagcgccggatcgtgatgatctccttggtgagcattttgaatacgtcggcgaagacctggagagtaccccagggcccgacgcgcatgggacccagacggcattggaacgcagcgcagaccttgcgttccatgaagatcatcaggatcgccaccactacgtacatcaacaggatgcagagcccgacgatcacgcattcgatgaaaatcgccagtccgagcggcatgaaagaagtgagcagttcatgtacccaacttgttactatgctgaaatcaaacatattgatctgttttatctgatctgttaatttaacggtctatatccggaaccacgtagtcgagcgtacctccgatggcaatcaggtcggcgatcttcgcaccccgcgtaatggtgtccatacacgaaacgagcggcaggcccgtcgaacggaatttcaggcggtacggcgatttgtcgccccggctttcgagatagacgccgaattctccgcggctgccttctacggctgcatagtaacttccttcgggaacacgtattacgggtttcatcttaagttgatattcaccctcggggatattgtcgataagctgctcgatgatgcgcaggctttccaggatctcctccatgcggaccatatagcgggcgaagcagtcgccctcggtgaagagtacctcacggaaatccactttgccgtacatggcatagggatgccgcttgcgcacgtcgcaggcccagcccgatgcacggcccgtgccgcccgtagcaccgaacgaaacggcgtcttcgcgcgtcagcacgcccgtgcctttgagtcgttgctgggcgatgacgttgccggtgaagatttcgtgatactccttcaggacgggacgcaggtatttgatcagttctttgaccttttttacgaactccggatggatgtccgcctgtacgccgccgatggtgttgtaggcctggatcaggcgtccgccagtggtttgttcgaggatgtcgagcaccttctcgcggtcgcggaaaccgtagaagaaggccgtcagcgcacccatatccatacagagacaggagaagaagagcaggtgcgaatcgatacgctgcaattcgtccatgatggtgcggatgtactgtacgcgttccgacacctccacgccgagtcccttctcgatgcacatgcagagcgcatggcggttctgcgaagcgccgaggtaatccagacggtcggtaagagcgagcgtttggggataggtcaggctttcgcacagcttttcgatgccccggtggatgtagccgcagtgtacgtcgagctttttgatgatttcgccttcgagcgatacgcggaagcggagcacgccgtgcgtggccgggtgctgaggaccgatgttgatgacgtactcgtcctcctcgaagagcacgttgcggcggcggatgatgctgccgtcgggctggagctcgtagctcggcgaactgtcgtgcgccacttcgttggtcatacggagcggattggtttccccgctctggtcgtagtccttgcggagcggataccccacccagtcgtcgcgcaggtagaggcgccgcatgtcgggatggttgatgaagccgataccgaagaagtcgaacacttcgcgctcgttcaactcggcccccttccagatgtcgctgaccgtcggcaaaccgcattgctcgcggctcggggtgaggactttcagtacgacgttttctcccgtcgcggtcgattcgaggtgatagacggcacccagcccctcttcgccccagtccatacccgtcaggctgcgcagaaaatcgaagcgcagcgccggatcgtcgtgcagataccgggccagatcgtggaactgttcgaccgggatggtgaacatcccgtcgccggcctccgtatagacggctccgggtacttttgccgtaattatctcttgcaggttcatacgtttttcttctcttcgggttccacattcagttcgggacgctccgctgtgaggtcctcgcggagtcgtttttcgtactccttcttgtcgatctgccgattgacgtcgccgaagaatttttgtagcttgactttacgctgcagctgcatcataccgtaaagcatcgcttcaggacggggcggacagccggggatatagacatcgacgggcaggatcttgtccacgccgttcactacgtgataggatttcttgaacgggccgccgcttacggcgcagcttcccgtagcgatcacatacttggggtcggccatctggtcgtacagacggcgcagcaccggcgccatcttgtgcgtgatcgtgccggcgaccatgatgaaatcggcctggcgcgggctggcgcgggctacttcaaacccgaagcgggcaaaatcgtagcgtgcggcaccgaccgccataaattcgataccgcaacagctcgtggcgaacgtaagcggccagaggctgttgctgcggccccagttgataacttcgtccaggcagcccatgacgacgttcgtgccgttggcacgcaactcctcgatcatcttctcgaggtattcgttgtcggtgaaatcttcgtatttcatcgacttgattttcggttttcttacttccattccaaggctcctttccgccaggcgtaggccaggccaaacgtaagtatcaacaggaagaacagggcgctgacaaggccgaagacgccgatctcctgcaccacgacggcccacgcgaagaggaataccgtttcgacgtcgaacatcaggaacaggatcgcaaagaggtagtaccctactttgaactgcatccacgacttgccgcgcgtgggaatgccgcactcgtacgcctcgcctttctgcgggttgtacgaacggggcgagatcgcgcgggccactcccagagcgatcgccaccagtccgatggcggtcaggattacgaccattagtagtacgaaatacatatactgtaaagagttgttttttcgggcaaattcggttaaacaagagtggtgcgcctcttcggtcggaagatgcgcatgggagcaatcgaagcggtcaaatccggattttgcccagcgaaaagacgtagtaatccaccgcgtcgggatggggattcgccggacgattgctgcaagggagcggacttttttccgaaggccggagagaaggagtcgctgatgcgagttgtctgcagtttatatgcagcatcggtgcgatgacctcgcttacggtttcggacgcgatgaacgaatggtggaaatagtgcaggccgctcttttcctgaggcggaacgtgctgcgtcaggctgccgacggaatcgccgccggaggcgtattgcaccggaagttgctggcggcagagcgttcctgtcgtcagtaccagcaaggcgaataaaaagtatcctatttttccggccattccgattcttttttccggccacaaagataacctttttcctgttagatgttctcttttgtccggcggaaaagtcttggattggataattttgatctcgaattgacgaatttcccgttcctgtaacgcgttacggtgaatggtcgaaaacgggtgatattcggaaaagcggtttcctgaagctgcagctatgcagcttggtcacttttcgaggttttgtacgatgatgtacggatatcggatgcaaagcctgtttttgaaatttcgggattacggataaaaatagcgctgcaaagtcgggttgcagcgctatttttcgattgaatgcaggcggttacgacgccggatgttccgccgaccggtattcgttgggggtaaggcctgtgattttcttgaacagacgggtgaagtgctgcggatattggaagccgagttcgtaggcgacctgtccgatcgtcttgttgggtgccagaatccgttccttggccgtggcgatcaacttgagttggatgtactcctgggccgatttgccggtttccttcttgatcagatcgccgaaatagttcggggaaaggcacaattctccggcgcaccattttaccgaaggcagcccttcgcgctgggcgcgatcccccgcaaaatagtcgtcgagcagccgttcgaaccgggccagaatgtcatgattgacgttcgaacgggtgatgaactgccgctcgtagaagcgcagacagtagtcgagcagcatttcgatgttgatggcgatgagccgtttgctgtggcggtcgatagcgtgttccagctcctgccggatcttgaggaagcagccgacgaccatttcgcgctctcgctccgagaggtgcagcgcctcgttcacttcgtacgagaagaatgaatattcgcggatgttgcgtccgagcgacgtgccgcgaatcaggtcgggatggaagactaacgcccatcctttcggctgatagacttcgccgttgtcttcgatgccgataacctgccccggcgccaggcagaccagcgtcccttcctgatagtcgtagcgctgacgcccgtaaagcaggtcgccgcacttcacttctttcagaaagatggcgtagaagccgaaaatatgacggacgtgcttcatcggatgcgctttcgagagatcgatcacgctgaccagcggatgcagggtttcgacacccagcaggtcgttgtattcgaagacgttttcgatatagtggattcccttttccatagtcggttcgtttttttgcatggaagcgatgctgtttcaggttgccgagcggagtctgcggttctgtcgcttgttcgaaacgaagaacgtgaacggcaaaatccgattcttccgtgttcgtccgggacgcatccttactattgcaaggatagtgaaaggcaggcggcaagccaaatttaacgttctgttttcctcctccttgcatagcagagttcaccagtgtcctctgcgtatgcttcgagcgtcggtcgttcgagcttgtccgagccgcatcttctcttctgcaaagatagtgaaagccgagaagaaaacgggagcttgttcacagttttccgaggcgtgtcctatcttctgcaaagataagcgctttattcgcttcccggacgcttcgtccggcaaaaaccgtaattttggtaagaagctccgtaatctgtgtcagggaacgatcgaccagccccgaattacgggtgcggaatctgtaattcgggtaatttctccggtaatttgtttcctcttttttcgtgcggaatatcctatttttgcaaaaacgaggagaggaaaattcgagtcccgtcgttcgaaaaatcgggatgttcgaaaaaatccgcttcgggacgaaaataaacagttaaatttaataggtatgaagacgaatttgaattacgacatgttcgttccgacgcgaacgttgttcggtgctggaactctgaacgaattgcacgcccagccgatgccgggccgcaaggcgttgttggttatttccaacggacgttctacccgggccaacagttatttgtcacgcacggaagagcagcttcgtatggccggagtggaaacggtattgttcgatcgcgtagaggccaatccgttaaaatcgaccgttatggcgggaggtgccatggctcgtgaaaacggatgcgatatgatcgtcgctctgggcggcggcagcgtgatggacgctgcgaaggctattgcggtcgttgcgtccaacggcggagattattgggattatattccttgtggaacgggtaagggcaaggcagttgccgagacgccgctgccgatcgtggcgatcaccaccacggccggtacaggttccgaaaccgatgcgggatgcgtgattaccaatgccgaaacccacgaaaagacgggcttcgtacatccggggctgtttccggtgctcgccgtcatcgatccggagctgatgcttaccgttccgccgaaattcacggctttccaggggttcgatgcgctgtttcattcgaccgaggcctatatctccaatgccgccaatctgatgagcgacatgtacgtgctcaacgctattgagaatgtggcccgctacctgcctcgtgccgtggccgacggcagcgacctcgaggcccgcacccgtgtagcgtggggcaataccctttcgggttcggtgatgtgcgtggggcgctgcacgagcgaacattcgctcgaacatgcgatgtcggcctaccaccaggagctgccgcacggcgccggcctgattatgatttcgaaagcctactacgcccatttcatcgaacggcacgtttgcgacgagcgtttcgtggcgatggcccgtgcgctgggcgtggaagatgcccgggagccgatggatttcattcgggcgctcgaggctctgcagcgggcgtgcggtgtggcggatttgcggatgtccgattacggtatttcgcccgacgaatttccggcgatggtccgcaatgccagggaaacgatgggcttcctgtttccgttcgaccgggagccgctttcggacgaggagtgcgaagccatttacagggcgtcgtatcggtaaggggttggttccggatcgggcctcggtcggaaaatgcagcccggggttcgttgagagggatgattcacacgatcgagatattcacgaataaaatttaacgattatgagcaaaaaagtattgatcctttcgtccagtccccgccgaggcgggaattcggacacgttgtgcgacgaatttctgcgcggagcgcaggaggccggacacgaagtcgaaaagatttttctgaaagataaaaccattcactattgcacgggctgcggcgtatgcaacgaaggcaagccctgtccgcagaaagacgatgcgccggagatcgtacggaaaatggtcgcggccgacgtgatcgtgctggctacgccggtctatttctacaccatgtcggcccagatgaagacgctgatcgaccgctgctgcgccggatatctggaaatccgcgacaaggagttctattttatcgtcgcggccgccgaaaccagcgttgcggctatggaacgtacgatcgacggttttcggggattcctcgactgtctggacaatccgcaggagaagggtgtcgtctatggtgtcggggcctggcacaagggggatatccaaggaaaaccggctatgaaacaagcctatgaaatggggcgtaacatttaatcgtccggtccgatgaaagtacggttatctatattggcggccttcgtgacgatattgtcgttcggttgttgccaagcacaaagtacgaatgttctgaatatgaaaaacgaaacgatttttccgcagatcttcccgcagggcgatagactgcccgaagaattctcccgctattttacggggcaggcttatctggcttcgataagtaacaacgaggcattgggaacgcatatttcgaatgtgactttcgagccgggctgccgcaataactggcacagtcacacgggcggtcagctattgctggtgaccgccggacgggggtattatcaggaaaagggagagcctgcccgtgagttgcggccgggtgacgtggtcgagattccggccgatgtcgtccactggcacggagcggctccggacagttggttttcgcacctcgcggtcgagtgcaatcccgctgccaatgtgaatacatggctggaaccggtcggcgatgcggagtatgaagcggctacggcgatgtcctggtgccggcccggactttcggccgctgccgtaaaaaacgcggagatgtggtttcccggcgaggcgcctgcatttgtgaagacggaccccgaactggccgaagtattcggtaatttcgctttcgacgaagtgcagcgttacgggaaactggatgtcaaaacccgtattctggtgacgatggcctcctcccttgcgcagcaggctgccgccacctatgaaatgacgctgcgggcggcattggccaacggggtcgcacccgttgcgattcgggaagtactctatcaggccgtcccttatgtcggtatggccaaagtggtcgattatattgcattgacgaacgattttttccggaaaaacggtgtcgaaccgcctttggagccgcaggccattactacgcccgaaacgagaatggagaaggggttggctctgcaaaaggagattttcggagacgaaatcgaacggatgtatgaaacctctccggccaaccaactgcatattcaacgtgcgctttccggcaactgtttcggcgactatcagacacgcaccggattggatgtccgaacgcgtgaactgctgactttttcgatgctcgtgtcgttgggcggttgcgagccgcaggtcaagggacatattcggggtaatgtgaatgtaggcaacgacaaagacgtgctgctggcggttgtaacgcagctattgccctatatcggttatccccgtacgctcaatgcgatcgcctgcctgaacgaagtgattccggaacgaggttagtttcaataattgtggtgatatggaatatgtaaaattaaacaacggcgtcgagatgcccattctgggttacggcgtctatcaggtgactcccgaggagtgcgagcgttgcgtttcggatgccattaagatcggctaccgttcgatcgatacggcacaggcttaccacaatgaggaaggcgtaggccgtgccgtccggaagagcgggattccccgcgaggagtttttcatcacgaccaaagtgtggataaccaacggcggctatgaaaaggcgaaagcgtccatcgacgagtcgctgcgcaagttacagacctcgtatgtggacctgttgcttattcaccagcctttcaacgactattacggcacttatcgggcgatggaagaggcttgtcgggtcggcaaggcgagggcgatcggagtttcgaacttttaccccgaccgttatgtcgatctggctgcgttctgtgaaataaagccggctgtcaatcagatggaaactcatgttttctgccagcaggtcgttttgcaggagatcatgcgcaggtacgggacgcagcttatgtcgtggggcccgttcgccgagggccgcaacggattctttacgaacggaacgcttcggacgatcggggaaaagtatggtaaaaccgtagcccagacggcgctgcgtttcctgattcagcgcgggatcgtcgttattccgaaatcgacgcatgcggagcgtatggctgaaaatttcgatgtattcgatttcgaattatccgccgaggatatgcactccatcgcggttctcgatcggaaggagagccttttcctgtcgcattacgatcctgaaacggtcgaatatctgatcaattacgaatgatccgttgcgggatagcgtgtacgagaaatgccgctgccctgccgttcgtccgaaaggtcccgaacgatatccattcgagccggatgctgtaaaaggcacccggcttttgttttccagggctgggcggggtttatgttgtccggtcagcgtgtggggccgaatcgtcgatgtccacgggcaactgtcgctgcactgttgcccgggccttcgtcggaccgaacttacggcgggccggattcgaagcgaacgatgcggggattcgtattcgtgtccgggaaaccgtcagcggagtgcccgtattgcgtcggccgatactcttccgtatggtctgtgttcgtccgagttattcagaagagtcaggtccgtttttgccccgtgaccgtgatcgaatagattcccacatttccggccttgtatttttgaatcgtgtctgcatccagatatgcctggagcacctcgtccggaatgacgattttcttggttctttcgatctgtatgtccgcgaagccggccttgcggatctcggtcaggtaatcttcctgttggatggcgcttgcgatacagccggcatacatcgcggcattgtcggtaaattctttcgggaagattccctgtaataccacatcggaaacgcagaaatgtccgccgggtttcagaactcgccggatctctttgaaaatgcggtctttcctcggtagaaggttcagaacgcaattgctgaccacgacatctgccgtgtcgtttcgtaccggcatgttttcgatgtcgccttccctgaattcgacattgtcgcagccccgcttcgcggcattggcccgggctttggcgagcatttgcggggaaaagtctattccgatgactttgccgtccgcgcctgtttcggctcgggctatgaaacagtcgtttcctgcccctgatcctaggtcgatgaccgtatcgcctggtttgatccgggcatatcgggtgggtagtccgcatcctacccccagatccgcatcgggttcataaccgttcagacgggagtagtcttcgctcatgatggtaaaaacgttctgcgagggttgtgccggagccgtgccgcagcagcatccgcatttcagactgtcgctgttcaaagcgagttcgtcgtaacgccgcttgaccagctctttgagttcatcttcctttttcataatctttttagaaaaaatatattatccaataatagatacccacagcgataaacagcatcccgacggtgcgtgcgagccactttcggattatctgcattcgtccgtagaagatgcccactcctgccgcgccgtaagccagtatccaggctgcgatgaccaccggcataccggtcgcaatagcaaatacgacaggcagaaaccagccgcccggttcggctgccgccatcgggatcaacattccgaagtagaaaaccccgctcgaggggcagaatgccagcgaaaagagaatacctaacagcaatgcaccccagcttccgtgacggccgatcttctcgcaatggcccgaaaatccgaatttcggcaggttcaacctgtggccgaaaagcatgaacagcccgatcagaataagtgccggagcgacgatcgcatcgccgtatttgccgatgattttttgcagggcgtaggtgttcgccccttcgcgcagcaagggaatgaatgccagcccgatccccgcatacgtgagaattcgcccggcagtgtagagcaatccgttgcagaaaacacggtgtttgtcgtcgatatccttgccgatgaatccgacggcggcgatgttcgtcgccagcggacaggggctgattgcggtgagcaaacccagaaggaatgccgtaacgatcggtgtcgtgccgctctcgagcagtcgttgaatccattccataagattattttgacattcgggttattgcatcgttaagccgggccttgaatgtggcgggctggtctttggcatagctgaatcccatgcgggtcagattttccacccggccgtttcggtcgaggatcagcgccgaccacccggcttggtatcggtcggccaaggcttcgttctcggcgatgtcgatgatccgaaggaccactttttcgcttccgatactgtcgatgacctcccgggtcagccgttcgatggcggtgcaggtggcacaacgctgtttcccgtggaaatagagaacctgtacgcagtcgtcggcgacagcttcaaccgttacgcggtgccgggagccgccgcatgcgtacaacagcgctgcggcgaggagaagagtggccgctttcatcggttcaataactctttgacctctgcgagtgaaagcttgcgtccggccgaaaccaccctgccgtccacgaccaatccgggcagtgtcattataccgtaagagaggatttctgcaatatcttcttccttaactattgcggccgaaatacccaattcggctatggcctgcgttaccgtttcgtagagtgtccgacatccggcacaccccgttcccaatactttgatctccatatctgtttctattattaaatgtagttcgacgaattgcgaacatttttcctaaaaaaaagcggtttcaaccgcaacaggaatttttcttcccgcattcgcagaaaaaatccgcgaacgattcacgggctttcgcccaattttcccggttgatgcaataacgtactttcggagcttcgatttctccctggatcaatccggcggctttcaactctttgaggtgttgcgatacggtggctttggcgatgggcagcacttcgtgtatgtctccgaaaaaacagctctcctgtccggcgaggaaccgcagaatcgccatgcgtgccgggtgccccatcgctttggcgaaacgggccagctgttcctcttgttcggtataggcttttggggacatattttcggatcttgtgttcgcaaatatacgaacaatattcgaatatgcaaataattttttcatttttgaagaatccgttatttttgcacaaacatcagatgatgtgatgatagagagtacggatacgacgattcgaaaaagatcgttggccgaagagatggccgtccggttgcaggagcagatcgcgcagggacggttcgaggtcggcgggaagttgccgaccgaatccgaattgatgaaaattttcggggtcggccgttcgacggtgcgcgaagccgtgaagatcttggccaacatggggttgctgaaagtgcagcagggggccgggacgttcgtcgaaagccggacggcacggaacgagtcgatggagcggtgcatgcaacgtgccgacatcggcgatctggaggaggtccggcggattctggaggtcgccattgtcgaacgggccgcgcagcgacgtacgcaggcggatatcgaaaagatcgggacacacctcgcccggcgcggtgcggccgccgcagccggacgattgaacgactgtatcgcggccgatgtcgatttccacgtggctctgtccgaggctacgcataacgaaatattgcacgaactctatcgtgcggcctccgtgcatttgcagaaacgactcgaacacatttatacggataccggttgtctgctcgcctcccaatccacgcatgaacggctgttgcggaatgtcgtcgcccaagagcctcggaaagcgttggaaacgatcgctgtcatcctgcaagaaccgtaacctatgaataccgcagccaaatccgtacgatcataccgctccctgacgagccggacggtttaccctattttgttgatggtcagtatcacccatctgttgaacgatatgatgcagtcggtgatcccggcggtttatccgcttctcaaggagaagttcgattttacgttcgcccagatcggcctcattacattggtctttcaactcacttcgtcgctgttgcagccggtggccggtctgctcgccgaccgtcatccccgcccctactcgctggccggcggtatgtgtttcacgctggccgggctgctggtgcttgccttcgcgccgggttttgtctggattctgattgcggtggggctgatcggctgcggttcgtcggtgttccatcccgaatcctcgcgggtggcgcaacttgcctcgggcggccgtaagggactggcacagtcgatcttccaggtcggcggaaatgccggaagcgctatggggcccctgttggccgcgttgatcgtcattccgttcggacagtcgtcgatcggttggttcgctctgacggcattgctggcgatttttatcctcgtaaggatcggcgactggtacaaacgccggctggcgatcgcggttcgcaggcccgacgctgcggaaacggctttcgcgcacagcctgccgcggcggaaaatccacacggccctcgtcattctgggcattctggtcttttcgaagtatttctacatcgcttcgatgacgagttactttacgtttttcctgatggacaagttcgccgtatcggtgcaaggtgcgcaatattgtcttttcgcttttcttgcggcttcggctgcgggtacgttcatcggaggaccgctgggcgaccgcatcggacgcaaatatgtgatttggggttcgattctgggggctgcgccttttaccctgctgctaccctacgtcggtttggctgcgaccgtcgtgctgtccgtagtgatcgggctggtcatttcgtcggccttttccgccattctggtttatgccaccgatctgatgcccggcaaggtggggatgatcgccggagtctttttcggcctgatgttcgggctgggcggtctcggttcggcgtttttcggctggctggcggaccggacgagtatcgagtttatttttcaggtcagcacgctgttgcccctgttgggtgttatcaccggttttttgccgaatatagagtcgaaaagcggaaaataggattttccgtgcatgttctcttgctcttgttcggcgcaggaaggggctgaacgtgggtgcaagctgaaaatcggtcgcgtcggccgtgttttctgctgcggatcgcgggaacttcggtcgatatatttactaccgcttcgactgttctgccgcaagtgttagggttcgggatggatatgtaaactcatctctattgtctttgcgaaaaatattggagtccgatcatattggtcggattctttgctatgaccgtttctggtcccgatgtaatgtataacctgtaatcgggtcttttgttgcggctccgtgttcgagggtgttacagccccgctccggccgttgttgtcgtagctccggatatgcgcggggatactccgcgtcgaattgttatggcggaggcgggaatctgttcttacgtcgtaccctctcttttttgccgcttttctctttctctccggtaacatgtctgtctgttttttttcggggttggccgcaggtgaagaagtacattatatataaatagtgattttgtattgcctttttttatgaaatatttattttattaacagatggtagaataatcggtgtcggggcagaatctaataaattctttaaataagaaactttgattgcatatccaacattttgagcatcgggaacacccgcatttgtgatgccaactaaattgccgtttttatcaaacaatgggccgccactattgccaggctgtatgggaacagaaatttgataagttacaacatcgccttgatagcctgtttttgaacttataatgccatccgtaacttttatttcttctcctaatatatctgacatgggataacctaatgcaaacacacttgttccgacatcaaggataggtgtttttactgcatatgggagttgtgcaaaatttgtaaatgatttatcctcgatttttagaatgctaatatcgtttgctttatctgaaatgagtactttagcattgtacgttttaacctctccgtttctatttacgaacacgtcgattccattggctccgtctacaacatggaaattagtgacgataatgccatttgtggcaataacaaaaccgctacccgacgaggtgtattgtttttccgttcctgaggatattggtcgctgttgtttagattgtgtttgtgttgaagctatgtattcgtatgctatcgagtagtaataatattgatatgtggccgctgcaaatggagtgctattatcacctgtgccgtatgagaacttaatttttagtgtaggtgttttccataaaacagaagaattgcctgttattagcggttctccataagtcacaactaaatccatatatttatcttcaaccatgttactgttgaatccagatgtataatattcgagtttggtcaatttatcatctatgaaatataaatcataagtagaatgtgggggttttcgaacatcgcctcttacatattcaatccattttacaccattatcataggtgcttgaattttgatatttgtatcccgatttttgaccaatggctccaatcgcagtaattctactacctcctaattcaaaaccatcaatggtttctgtttgagcatgtaaaatgaatgcctgaaacattaatattataagtaacaacaaagatttcatgtcttgtgatttttattatggcttgtcataaatgaaagatagctgttaatatttctttgacggataaatctgagaatgatttcccatcaggtaaatagcatgggacaaaatggcctgtcacatcggaaaagttttcattagatgaaacaatatttacctcattcccattagcctccgatagttggattatcgcattaaaaacacgtgtaggatcatgccgtttacaaagtatggcatttagtgtttgtgactctgagttacaattcacaatcttttggattacaaattcagttggcatttgacacataatagaaaaatatatgtgccgtcccatccctcaaacggcaagttaatggtaataagaaagcgcagggctgaaagctcatttgaggatagtaggccgtaggattgcccgaacattcaaataagcaacaaccccgcgccgtatccgtaaaggatatgacgggagataaggtctgcctattctcatgttcaatgaatttcctacgttcactatccgagaataaacttacgcttccgtaaatttcaatatgtcatccacaaaggtaaaaaacatattctgaaaacgcaatgaccttgtcccgcttttcgggattgttgccgtatcaaatttctgaaaaacaaagtttctatccaatagcagggagtatggaatcgaaactttgttagttgtaggttgggttaatcgttcccgcagatttcttgtattacgccatccatgtaaatagcctgtccgctggattgtctgccccaccagtagcaaccgtattcctcgatgataacctcgccttgcgctttcagtcgttcggccagccatgaatcaatcagccaccattccataacatcatccgcgaacggataaagatattcttcggaaataaggtttgcccgtatcatttcctcgataaccgtgctttgattcttcaaaacacaattctgtactactcgccgtgcattcatcgaatcccctgttgagcggctatgttacggagccattggttcgcaaatgtggtatggtcggcctgcaaacggcggttcagtaaaatgccctcgtctgtccactttacgctgtactgttccactcccatataatcgttacggtagtagtacggaatgaattgccgtgtttctttatggagggcaaagagcatttcggggtcgcgcatcatatccccgttctgctccccgtaatgtgccagcgaaatgtgcttgtaggtttccgagcggtcgatgatctcgatataaacgggcatataggcttcgtccgtgttgtcgattttggatgtttgcagggctaacaaggctcgcagaatctctgacgcccgtttgtctaatgttttcatagcgattaagtttttgtttatcgcttatcagtagtaatccaacttcatgtaatatcaataattctatgctgttatatggtttcggacgcagataggggtggcttgtattatgtggaatcctattatatgtaatggataaaaattcaatttcccatctgaaaatggggaggggtgaaaaatagggattgtccgctcggtcataaaaaacggaccgattttttcaaaaggtctatattaagaccccttgacaaaattggtccgaattctgcggaatggtatttagcttattctttccagatttttccgcctaaccatccgatgaaattgattcctgcggccaaaacgatcggtccgataaacagcaaagccaatgcggataaaagtttcatatttatttgatctttaattggtttgattcagtttgcaggtcaggggcttcgcccctttccaaataaagtcagaatggtttggagggaatgaatattgccgcaaggatttcagctatgatgctgtaaatggtcagcagaatgcgaaaaataagcataaacagtccgataacaatgtatttacccgacaacatcagaaagactacaaacagaaatgcaataaagcccgtcatggcagattatattttgattattaaatgattattgttgtttttatttaggaccaacttgcgcaaaggggtttatataagtcccctttgcaaagtcggtccgatgcccttaaaactcgaacatcttttttccgagcagaaatgccttttgaccgccgaggcgttttgtgtcgtcctcgatctcgaaaaagagtttcacgaccttacgatccacccgccgcccctcgaacggaatgccgttgttcacgatcagccgatgcaggaaattgttgatttccgagcaggccaccagatcgcccgttttgtattgcgcgtaaacagcttcctgcatcttgggggctgtcagcagcacgttttcttcggtgcgggtcatggccgcttcgatcttactgcggctgtaccccaattcttccatccgttttgcaccgagaatcgtgaacgcctgtacgattgccgcaaattcattccccagttcttcttgcagaaatgcaggttccatgtcggagtgggccgtttggagtttggcaagctgtccgaccacctcgcgccacaattcgcgggtattcattttcgctttctcacgacgcagacggtccgcatccgttatcgggtaatgggccgtgcagacagtcaatcgaaacggagccgatttataggccgcggtcagcgtggacggatagcgataatatgctttaatttgttcatccgtccacgcattgtcccacatgaaatggttgcggtttccgtcgcgggttacgaaccgtttgtaggccatgccgttcagggcttggaaacgggcctgcgcttcatcctcgccgtcgggctgtatctggcggatttggttatagatgttttcctcgcccgtcagtcggcgttcgagggcttcgcgggtcaggcattgcaggttgtcgcttgtattggcgatatggtatgccctcgccacgccgttacggaaccgcccgatggcctgcacgacctcggtctgcgggtctactgccgaaaagggggcacgcattacatccgtcagcaggattacatggggtttgtagtctaatttgatatccacggccgcatagaaacggctggtcagaaaattgacgggagccaattcatcgagcgtttcgctggcgtcggtgaagttcatctgtttgagtttccgcacgctcttttcactgcaaaagaccctgcttcggccttgcagtctgagggcatagataaggctcaaaatcgtttccgtggagttcagaaacacgcagaccgtttcgttttccagacgcttcaacagtttccgcattactgcgaccgtgttgttggtcgtgcaaagcgtcagttcgatccgactgtcataggtcggaacgagtttcagtatcttaaacccgttttcctcgaaacgcgggtcggacggaacgataggcgttgccgaaaccatcgccttgttctcgaatttgaaaaaatcctcgacaggcaggtagatgtccccgcggtagcctacatcctgtatggccttttcgcactcgtcgaacaacaggaaatagtccttatagacggggatttccaactcgtgcatggcagggagcacctttttgtcaaagccttcgggcgtcgtgatgattttgcgatagccgtcatgctcgcccgcaattctccagatcctcgttggtggcggcgatgatgcggacattgaagctcttgtccgtcttgtcacctatagggcggtatctccgttcctgtatggcacggagtaacatctgctgggtttccaatgcgagattgcctacctcatccaagaacaatgtgccaccctctgcctcattgaagtatcctttctttgtgctgtccgcacccgtaaacgcgcctttgacatgtccgaagaatgccgagggcgcaaggtctttggagagtgaaccgcagtccacaggcacaaacggtttccctgcccttttgctcttatcatgcagatggtgggcgatatgctccttgcccgtgccgttctctccgaatatcagcacgctcatatcagtaggggcaactaatcttatctgttgcatgattttctgaaaggcggaactgtcacgggcaaaaacgggcatacgatttcgtccgatactccgttctttcaggatggtatgaagcagaggcataagtttatcctccacaagctgcttggggatatagtccagcgagccgagtttcatactttcgactgccgtatgcacttcggcatagttggtcatgatgattaacggttgtgtcatgccttccttgcgcatccatcgtaataggtcgatgccgtcaccgtcgggtagtcgtaggtcagaaaccacgatgtccccgtctgaggcttgttgcagaagtttcttcgcggtcgagaggtggtaagcctgcacggtacggaatccttcccgtgccagcaggttgcagacaaactcgcaatacacgatattgtcctccaccacgatgattcttgttttatccattttcgtatttttcctttcttcttttgcctgccggataatttcagcacctttatccagcacagccggtcaccgctttgcatatcgcttcgtcatctggagtggcacttccatgaagttgggcgtaaagttccctcaatggctggtcggcacggagaatctgccatgaacttcgcagatggtgtgtaagtgtgtccagttcttggaggtctttacgctgttctgcatccttgaccgcctgcatttccttttcggtttccgctatcagtttgtccagcatgacggattcattgccataagatagcagagtggaaaaatccggcttttcatccaatatgctgcttaatgcgcatttatccgtaatctccatcagttcggatatggagaacggcttgaacaggcatccggcaaatccacgccctataagttcctccttgctgcaactgcccgaagcggttgtcacgactatgggaatactcttcgagttgcctacattggatgagcgcaacagttccagcagttcaaaaccgcttatctcaggcatattcagatccgtcagaagcaggctgtattccttttttcgtatcagctccatcagtaccgaaacattggtacaggtatcgcagtgcatcccttcatgggcatacatttctttcaacataaggagaagtacctcgtcattgtcgatggcaatcacatcatggcagatatgattatggcgcatttgcgcttgaattgtctgttccggcagttcctcggctgtctgcatgggaatttccaccgtgaagcggctccctttgcctttctcgctttccaagcgtatagttccaccgagcatcgccacaatacgctgcacgatggacaatcctaatccgaagccgtcttttgcggcggcatttgaaagacgttcaaatgcaccgaatactcgttgttgctcatcttcggtcatgcccgtaccggtatcttcaacgataagtttcagcaaaccgttatcataatccgctgccaatgatacactaccgttatccgtgaacttgatggcgtttgacaacaagttgttgccgatttgcaggatacgttccttgtcggtcaaaaccaccgcatcggtgtggctctccactatcaaagtcagccccttgttcatggcaatgggcatgaactccgtttcaagaatatgcgtgattgcggaaatcctgcaaggggaaaggttgggttgctccttgccgttgtccagacggaagaaatccagcagcgtgttgagcatctcccgcatacgctcggaagattgccggatattatccacatacatggtgcttttatccgcgctacaacttttctgcatcagtccggcatagcctcattttgtcaatcgtattttttcgtggtagaagtagtttacgatgacaggtttgcctttttccgagcgtccgtatggcagatcgtttatacgatacgggaagccctgctccttggcgtaatttgaaatgtcctgctccaatgcctgccagtattcaagcctttttttattgtaaatttcctcgtaaagcggtatgaggtcaggatacttctcacggatatacgtcattatcccgcctttgaactgcccgcgtaaattcaggttttcaagccagattaaatcagcataatcttttacctcctctattattgcctttacgtctgttattctggggaatatgggcgagacgaagcatacggtgcggatacctgcctcgtatgtctgacgcatcgctttcagacggcgttcaatgcttacggcgttgtccatatctgcgcagaactgctcgtcgagcgtattgacagaccatgacacagtcactttgggaaaactcttcaacaggtcgagatcgcgaaggacaagatcggactttgtgcatatcataatctcggcattgcttcctcgcagctcttcgagcagccttcgggtacggtggaattcttcttcatacggattgtaaccgtccgtcacagaccctattacaacacgttcaccgtcgtatttatgaggattcgttatcggcttccagttttttacatctaaaaacgtaccccacggctcggtgtgcccggtgaaccgtttcatgaacgatgcgtagcaatacctgcaggcgtggggacaccctacataagggttgaccgaatatcctcccaccggcagagaggatttggtcattacactctttacatctatttcctttattgtatccatattcattgtattcgtctggtaaattgttccggcaattcctgaatcattctttcgtcgcccataatcggcagcaaatcctctttcatgaacaccggtatgccatgagcctttgcctgttctgcaatgctaagcacccattcggggcgcgaatatgactttccttttcggtttccggtctctgtgcctatgacaatccagtcaattccctcgaaatcaatctcgccgatatcatcgaagagaggttcaaacgtgacatggtagtgtcgtgctttgatattctttttcaaatcatcaatcctccttttctcggaactgcgcgtgacggtcacgcccatccatacgttctcgtcgtcagaggagaaactgattttgtcagggcgcttcgtcagaaagatataggcgtgctggggattgctgctgatccgctcgaaaatttctgcgttccattcaggcttccaatcggagaaatcgctcattcctgtcatgagccacacatgaggacgggacgtatcgatgatgcgcagttttcgttccatgtattcaggcacggaaaagtcgtcggtaatgtggaaacggcggcagttgttacgggcatagcagtaagggcatcctatagtgcaccctaccactatgttcatgttttttatcagggatttaatgcagacactcataacacaactgtttctccgtcctccgggataatcagccggctcatgtcggcttcgtgatgcgttgcctcattgcgcagaattgcacgggtggtctggcaatggtcgatggcatccatgtgtacggctatcagcttgatatgcgaaggcaattcgtcaagtatctgcatcacttcgttctcgtcggggatgataggaccgtccgttttggaaaattcgggaaagattgcacctccggagtttaccacgatatagtcaggattgaaccgttccacggtgtctcggatacatgcttcccatcggcagtcacccattatataaacggtcgggaagccctcggcttttagcacataacctgatacaggtcccatcatctgcccgatctgcccgaaaccatgatgtccggtcgtgcggtaaatggatatgccgtctattgtttttatttcttcgatgggtatcacatttgtaaatccgtcgtttctgatggcgtccgcgtcctggggctgaacgtagaaaggaatttctttgggcaaatgtgtggggacactcggctcgtaatggtcgatgtgattgtgggtcaggagcaccatgtccacgcctccgataatatcctgaataggaatggtgaggtgtaccctcggtgttttattcacaccgagggccgatatcaaagtgcctttgtcggctaaaacggggtcaattagcatggtgtgtcccgcatacctgattttcaaggtggcattgcgcaccaattgtactgtggatgtctttttcatgactatatgtcttgttattgattacgggtgcaaagttcggaagaatccggcgaaacatctatgcctgaaaaaacggtaattatgccattttgataaatgaaattattatctttgcaaaaacgacaaggatatggacgagataatcaaccctgatcgactggtcagcgtaccgttcaacaagacacgctgcggcgtggatttttacatcaatactgccataaacaaggacatcggacttgtgctgacagaaaacaagcggtttaagacagacttcttcagcttctactttttccgtaaggcaaacggatatttgctactgaacttccgcaagattgaactgcgcgacggcatggttctcctgctttcaccccatcagcaacaagagtggcatgtagatgagacggcgttggattacacgttccttatattccgcgaagatttcatgcgtacttttatcgccgacaagttcttcgtttttcgccttttgtattgttaccagacagatacgccgccttacatcaatgccacacatgacgaaatgaaggaatatatgcggctgctcggaaagattaagtatgagctgatgaatccagtgtccgatacgtacaatatcattgtttccttactatattatcttttgctgattatcaatcgtacatacgctgccgcctattgcttgcccgctgaaattgctaaaaacaatttcgcttttcggttcaaggacttgttggaacagaatatccgcacccaccagcgggtgcaggaatatgcagacatgcttcatgtcagtcgcatcacactcaataactcagtaaaagcccaattcggagtatcagctacccatttgataaaacaacgtctgcttgaggaactgaagaacgaattgctattctccaaccgcactgtcagtgaaatggcggatgatttcaatttctctgatccgagccatctcatgcgcttcttcaaacagcaaacaggcaaaacatttactcagtacatgacggattacaataaaggcatatacgaataacttcttaatatagtcgatagcggctgtcgaaatatggttgttgatgttcaggcgtttttgtactgcatgaaccattttacgatttctggatcttcgtgcgagccgagtaagaaaggcttgtcggtatccagcgtctttatccgtgccatgtcgtcggccgacagggtgaagtctaatatgtcgagattctgcttcatgcgttccggtttcacagacttaggaataattatgcacactgatatttatcgcgcccggacaggtgttcggtgcggaagatgacggcatgcagttccaaccagatggctacctgcttatgttccatcccgacctgctgcggaatacacctctcgggcggataatgcgtgaatattcgttcttttcctacgagacaaacgaggcattgcaccttagtgtggaagaacggcaaatcatcatggattgcttccacaagattcaatatgaattgaaccatccgatacaccgtcacagcaagaacctcatcacagacagcatcaagacgttccttgattactgcacacgtttctatgaccgtcagttcatcacacgcgacaaccaaaaccgagacatcctcgcaagatttgagcggttgcttgacgaatacttccatgatggggctgctaaacggataggcttgcccactgtacagtattgtgcagacaagctctgcctctcgcccaactatttcagtgatttattgaaaaaagaaacaggttcaaccgccctgcatttcattcatgacaagtctattgaaatagccaagacggaacttgcatctacagacgacaccgttaatgaaatcgcctataatctcggttttcagtacccgcaacattttacccgactgttcaagaaagaggtaggttacactccgaatgaatatagagcgcaagtgtcgtgagaattggattagtacagaatattagaacccaacacctctcttgcgcttaactttcttccttctgcgaagtatatccaccatttcctgattggcttccgcatcagcagcgttataagatgagccactgctttttagcaatccccaagagccgttgaacaactcgctttgtgccgtgccggacggtgcgcttggtgtagccgtttcatatattccggctgttattcccatacgttccctgcatctgttgtgctgcaaagccgcgtcaatcttggaataactgaaacgcctgtccactttggagccgttgaaatggtagccattcatggagaatacaacaccctgcacctcgctggtctgccccttatgcttgaaatgtacttccactccctgccgtttcaggttggcgataagcacgttccagttgccgcatctgccgacttccattttgatgatgtcgtaaagcgcatatttcgtcctgtctggctctttcaggcggttgcgtttgacattgtcctttccgccagccatatgcaagccgtatttcaaggtcaattccttgcagatgcgggtactgcgcagacgctcgtgcctgtccgatatggtattgccgttgttgtctatgcggttgaaagcaatatgcacgtgcggatgctccttgtcgaaatgctgggcgatgaagaactgcgtattcttgattcccatccgtttcatatattcaagcgcgatgcctgccatgatacggttcgtcagccgtaactcatcctctttggaaaaactcaacgcgatatgtccgacaggttttgtcaccttatcgttcatccgtgactgggcattgaaactcatggcgatagtttccagattttccataaacaagccttcgcttgctactatctgcgtatccttcttcttgtcgatgatgtaatccaccgcacccttgaagtcgcttccttttacgattttcgccatcatatccctatcttggttataagttcatgaatccttgccactgccaccttgcagtcccaccgttcatcgtggaagcctccggcgtttgccttacgcgcaagctggttgagattgttagccatgccgcagagttggcggatgtatccggcatgttcctccgacagccgttctttcacatgaccgttacggaaacattccctcatgtactcgcttggtgatacgcccgcctcatgcgatcgtgtcagcaggcggaagtagtcggctgccgtcattttcactgcgatacggtatttcagtttctcggttgcttccttcttggggcgacctcccttgttgcgttccttgtgttcctttgtctgttccatattttattccttttaattcggttactgattcaactgtatagaccgacgggatgccacctcctgcaatttggatggtgggtggcaagcggtttcggtacacccgaaacacaaacttgctacctcccaatccttaaggaatgagtttcgggcatctcccgtttttctcattcgggatgtcataatcccaaccctttcttcttgggttttacgatagttcttggcggtggactaacggctaatttctgccggattccacgcaggtaatcgttcaggtctttatgccctttgtagttgtcggagaagtcgcggatgcgtccggcgaacttcctttccaattcccgatacgcctttcttcccgcctcgtcattgtcgagcatgcagtggatacgtccatacccgtgcagcacatctatagctttggaaacattggcggtcgaattgaggatgacgtaatcctgcctgtcaaggtcgggcaagttcgagcagttcctcttccgcaacgtgaggaatgaaagatagtccatcatgccctcgaatacaaggcatttctctctcgcttctccctgttgccgaatatggctgatgtctttgggtgcgacacagcctttgaaaaaacggttacgcacttcaaatcctcccgccacattcggaaaaccgatggcgaaatagggcttgccgttatgggtgaagtggagctctttacattgcgcctttgccaaagcgatgtttatgccccgttcctgcaagtatcggagcaatgccggatgggtgagttcgcccacctccaaatgttggaaactcggttcggatgcctgctggcgaaaagagaaagatatgggacggatgtgtggtgcctgttccgctatcttgccaagcagataaggcacatggtcggatgcgtacagtacccctgcaagtgcgatgatgttaccacctcttcccagtcgtaggctcggtacagaacgccttactgcctttcggcagtaggttttcccgtacctgcccccaaaccgtacttgctcctactcctactcctactcctactcctactcctactcctactcctactcctactcctactcctctaccctcccttccggacttctccgacacgagctacgaaatgtttccgaaccggcaaaagaaaaccccgcacatatagaatgcggggttttcttttctcaaatccttaaaacggctaaaagtgagccataaattccaggacgatcttgtcgtgttcggaaactttggggacgacacccttgtcgtaaaaatacatctcatagttgagccggatatcggccataaaaggcaatccgaagctgaacgtaatgcctgccgtgacgcgatgacgctccagatcattgacgaacagcagaccgttgtcgtcgggaatgccgttgctgtgatcggacatatagtcgtaacggcctgcgaacgacatctttttgaagacacggcgcaaaggcaggtcataacagaaaaatccgtcgaaggcattcacgcccgcgaacgaattgcgggcatactccttacgcagatactcggcctcgaagaaccaaccgcccaagcggtaggagcaccccacgtcgtaaaggtgaatccgcgtatcggcaggacgggtcgtctggtagctcaccacgaaattcatcccctcggcaaaaccgaactgcgcctttgccgcatagttgaatttgtcggtccagaaatccttctggtcgtcgatacccgacccgttgaacataccgacttgcaggttgatcggaaccttctcgccgaatttccagcccagggtggctccgacatcgcggacgctgcccacctgcttggcgatgaacgaacggttcgcaaaatactgcgtatggggggaacggtgagcatcgatggtaaacgggacccgcataaatccgatcgtgaaaccgagtcccttatagagtttggtccccagatacgcattgaccatcttgatctttccctcgtccgagaggtcgatctccatacagtaagccagtttcgaatagatctcgccggccacgccgaagcgggcgttgcgaacctggaagcgggcatcgccctcgccgggctggtactcgaatttggcccggagcgttcccaacaggtcgatcgtcacgggtggagcctttttctcctccttttgtgctcccgaagctgccgaaatttcgaaatgagtctgaactcggactccttcgtcctcgtcatcatcctcatcttcgtcatcatcctcatcgtcgttctcacgaccgtcgcccttgtcacgcctcctgtccttctgcgaaagctcgccctgcccgacgttctcgtcctgcccggcatccgtccgcaccgcagcggcacgatcgtcgtcatccgtatcgacatctttttcctgtttcgggtgattcgtactctccggctgcgactcgatgaccatctcttccagatcgtcctgcacgggtatcgtttccacatccaccctctccaccggaggttgctgggccgctgcggacaacgacatactcatcgcaaggcataataaaaaccatccggccactctgcgggtaaaattctccataggcaactctattctcttttatcttgtcgtcagatacgggccacaggcataatacattgattgaaacctatttaaccctttcaaaatatctcgtgttccgcaaatatagacaaaaacagtgcaaatgacactgtttttgtctatcgcaggttcaaaatacgacttattacttatttggtaaacttattacaagccttcagcaactgacgcaacgtatcgactaattcctgggactcctgcagcgtaatcagatagacgagcgaaacatgcaggctgttgccctcctcctgcacccggtacatctgggtcttgcgctcggtcgagatggattcgcgcaacccttcggcttcgatcagcacgttctcgatatccgaatagtcgttctgctccatcatgcggcgaatctcgaccatcaggttgaaaatccgggtccgaatgggcaggaactcccgcagataaactttgggcatcgggttgaagttattgccgacatgctccttgcacggctcgcaaagacgtttgagacagtaataaagttgctcggaagcattgctcgccgtgtggaaccaggtgttcttttcgagcgccaggttgcggtcgatacggcgcatggcgagcatctgccgacgacgcacccgcttgagcaggtctttttctcctccgagcgcccgttcagctttgcgcaggctcttgatatcctccttcagcaaaccgtcggtaatctgacggaaggtcgattcggcgaacgttaccgatgccatgagcgactcggtcatatgtcggcggagcaacgtccacacttcggccttgtcgcgggaagtcatcatccccttgaaaacatcatcgtgctcggccttcatcttccggcggtagcggatattgctgcgtatcaggaagagaatcgtcagcgctacgaccacgaccatagcgatcgtaccgccgtaatagatagcaagcgcgagcaggaacgtcgccacgaaagccgcaccggccgtaatgaaccagccgccgatcacggaaatcacacccgtaatgcggaatacggcgctctcgcggccccaggccttatcggccagcgaagaacccatcgccaccataaaggccacgtaagtagtcgaaagaggcaacttgagcgaggtgcccaatgcgatcagcaagctggccagcagcagattgaccgccgcacgtaccatatcgaaagcggcaccgttctccagaatcgcctcgtccttatcgaagcgtttcccgagccagcgcttcagtccctgcggcatcgcattgtcgattccggtagcgagggacgacgaagcacgcacgatactccgggccagccccgacgaaccgaacatctcgtcgccggcatcctgacgggccagatccaccgaggtcttgataacgccccgggccttccgcgaagtggtcagggcgacgatcatcaccacgcccgaaagagccaggaaaatgaagggcgtccgggcaggcgcgttcagcgaatccatcaggaaggtttcggatccgttgccgttggcgacgtaatccatataggaagagtagcccgtcagaggtacgcccacgaaattcaccaggtcgtttccggcgaaggccagtgccagggcgaaagttcccagcagcgtgactaccttgaaaatattgatccgacaccagtggagcacctgcgagagaaggcagaagaagatgaagcagccggccaccaggtgacgggtataggtagaaatccactccgacagttcgggtgtcatgaacgacgaatccttcatacccttgatcagaatgaaatagatgatcgccgtcatcgccacaccgccgaacagcgcggcggaccacttcatgtgcgacttataattgaaagtaaagatcaatcgggcgatatattgcaccactgcgccgaatacgaatgcgatcgccaccgaaaggaagatggccatgatgaccgacaaagccttttccgaattcagcatatcggcaaaggtaagccccgtatcgtctgcggccagcttgaccatcgccagagcgaacgcacctcccagcaactcgaaaacgatcgacacggtagtcgaagtcggcagccccagggtattgaaggtgtccagaagaatcacgtcgattgccatgaccgccaggcagatacacatgatatcctggaaatagaactgttcgggcctgaaaatcccgtgccgggcgacatccatcataccgttgctcatgacggcgccgcacaggatacccaccgcagctacacccatgatccacttgaacgaagcggcccgggcgccgacggccgaccccaggaaattcacggcatcgttgctgacacccaccaccagatcgaaaatcgccagcagaaagaggaagaggacaatgcctaaatagattgattccatacttttttaattggttttacgcctaaagttatcattcgggaacaaaagtaccgggcggaaatgataacgacgtttcaaacctgttacaaacccgttacaaaatccgggaaatgcctcgtttttatgaaccgtctgttacaattccgtgaaatttcgatccttccggatttgcgaaaccgttttattccctaattttgacgcgtcgaatcaatacgaaggtcatggggaaatacaaaattctggtggtggacgacgaagagtcgctgtgtgaaatcctgaaattcaacctcgaactcgaaggatacgaagtggatgtggcttacagcgccgaacaagcgctggcgatgcatcccgaacgttattcgctgctgctgctcgacgtaatgatgggagagatcagcggcttcaaaatggcccgtatgctcaagtcctcgcccgaaacggctgccgtgccgatcatcttctgcacggccaaagacaccgaagacgacaccgttgcgggcttgaacctgggtgccgacgactatatctccaaacccttctcgatgcgcgaagtgacggcccgggtacggagcgtgctgcgccgctcgcaagcccggcaggaggaggaagccatctgtttcgaagggctctgcctcgacctgcagagcaaggtctgccgggtgaacggacaggaggttcccctgaccaaaaaggagttcgaaatcctcaccctgctcctttcccaccctagggtgatcttctcgcgcgaacagatcctcgcccgggtctggaacaacgaagtgatcgtcctggaccgcacgatcgacgtaaacatcacgcgcctgcgcaagaaaatcgggccctacggctcgcatctggtgacccgcctgggctacggctatggatttgaaaagtaaacactcctatcagacgcaatcgttcctctggctgctgggcttctcgtggctgctcatcgtctgcttcgtcggcttccaataccaccgggagaaggagctgcgcacggagctgctcgattcgcagttgcagatcatcaacgcccaactggaagaggctttgagcaatgcacgcactccccacgactttttcgatgcgcactccgacttcttcgaggggctgcgcatcaccctgatcgacctggacggtacggtcgtctatgactccgaagaacccccggccgagatgtcgaaccacctcgaccggccggaagtggcggccgccctcaccgacggtcacggctatacgatccgccgccagtcggagaacaacgggcgcacctacttctactccgcctcccgcatcggcgaccggatcgtccgctcgtcgctgccctacaccgtgtcgttgtcgcaggtgctgaacgccgaccgcaactttctgtggttcatgggttcagtcaccctgctgctgtgtctggtcggctactacgtggtccgccagttcacgaaaaacatggttcaaatggaggcgaccctcgcagagcgcgaccgcgaacatgccgccgcactgcacgaggagcaggaaaaaatccgcatcaagcggcaattgaccaacaatatcaaccatgagttgaaaacccccgtaagttccatccacggctacctcgaaaccctcatcgccaatccgcatatcgacgcagcgacgcagcgggccttcctcgaaaagtgtttcacccagtccgaacggctccggcaactgttgcaggacgtatcgtcgatcacccggctggacgaaggaggacagatgatcgaccgtaccgaagtggacctccgcgccctgatcggcgaagtgataaccgacacggccccggaaagcgcccgacgcggatttacggtacactggacatgcgaccgtcccctgacggtcgagggcaacgaaggattgctctactccgttttccgcaacctgacggacaacgccctcaactactcgggcggcaaccggatcgacatcgccctgacggacgaaacggacgaccgctacgaattttcattctcggacaacggcacgggcgtcaatcccgaacacctgccctacctcttcgaacgtttctaccggatcgacaaggggcgttcgcgccgggcgggaggcaccggactcggcctggcgatcgtacgcaacgccatacttttccacggcggccgaatcgaagtggcgaaccgcccggaagggggactcgtgttccggttctcgatcgccaagaagggggaggcgaagagatagccgttccccttcgaaatcccttgcaggcagtttcaacccacaaaggcccggttcccgcacggattcaagccctgaaactgtgccgcgcagaacttccgaaagcccctccggagaaaacggcatagcgtaagtcgaaatcacacaaaggacatatcgccgaagacaacagtccgaagcaccctgccgcatgcactttccagatagaatcccctgccgcccgatcgggcggcaggggattctattctgtcgaaacggggcatcagtgcgcttcgagccaattgtcgcccacgccgcagtccaccaccagccgcacgcgcagcgcagcggcggactccatggcctcggtaacgatggcgatgacgcgctcctgctccgaacgaagcatatcgaccaccaactcgtcgtgcacctgcaggatcaccttcgagcggatgccctcctcgcggaaccggcggctcacgcggatcatggcgatcttcatgatgtcggcggcgcttccctgaatcggagcgttcacggcatttcgctcggccaggccgcgggccacggcgttgcgcgaggcgatgtcgttcaggtagcggcggcggccgaagatcgtcgaaacatagccgtcgcgcttagcctcttccaccacccggtccatgtactccttgaccttgggataggaggcgaaataaccttcgatgatctccttggcctccttgcggggaatgtcgagccgctggctcaggccgaaagccgaaataccgtagataatgccgaaattggcggtcttggccttgcggcgttcgtcgctgtccacctcggccacctctttgccgaaaagccgtgcggcggtggccgcatgcacgtcctcgccgtgttcgaaagccgcgatcagcgactcgtcgccgctcaagtgagccatcaggcgcagttccacctggctgtaatcggccgaaagcagcaggtgctcatcgtccgaagggatgaacgccttccggatccggcgtcccaactcgtcccgcacgggaatattttgcaggttgggattggtcgaggagagccgtccggtagctgtcacggcctggttgaaggaagtatggatcttgcccgtcgccggattgaccagcagaggcaatgcctccacataggtcgaaagcagcttcttcacgccccggtattcgaggatcttatcgacgatctcgtatttgtgggcgaaagtctgcaagtactcctcctcggtcgaaaactgcttggttttggtcatcttgggcttctccgcgatgcggagcttcccgaaaagcacctcgcccagctgccgcgccgaattgacgttgagcgacggctcgtccgccagacggcgtatatctccctccagatcgttgagggttttattgagttcgacggcatactcggccagcgcctccgaatcgatccgcaccccggccgtctcgatctcggccagcacagcgatcatcggctcctcgatctccaggtacagcccggccagatccaactcctcgaccttcggccacagcacctgtttcaagcgcagcgtcacgtcggcatcctcggcagcgtattcggccacccgctccagcgaaatcatgtccatagtcagctgccgggctcccttgccgatgagcgaagtgatcgaaatcggccggtaattgaggtagcgcatcgccagcgcatccatgttgtgacgcgactcgggatcgagcaggtaatggaggatcatcgtatcgtaaagccggccgcgaatctcgacccccaggcgaccgagcaccatcaggtcgaacttgatgttctgcccgatcttggcgatcttttcgtcggcgaacagcggccggataagggccgcatattcggccgtattggattcattgaacggaatataccacgcctcgtaaggacgtaccgcgagcgaaagccccacgatccggtcgttgaaaatgtcgaatcccgtcgtttcggtatcgaaacaaaactccggacaggccgccacttcgcgcaggacagcctccagctcctgcaccgtacgcacgatcgtataggcgtggggtgtggtttgcgccgtggcgaactcctcgctttccgccgtctgttcatcggacggcgccgatccccggtcggatgccggggattccccgggttcggctgcgggagcgaacagatctccctgccccgccagcgcagcttttttagcggctgcggacttcgcacgcgccacctccgccaactgggtctgggccgcctgacggggcccttcgggcagcggttcggcaggagccaggttcgtcagatcgttcaggaatatccggaaatccagctcggcgaaaagggccttcagctcgtcgatcctgggggcgcacaccgtcaaatcttcctcccgaaagtcgatcggcacgtccaggcagatggtcgtcagccgcttggccaacaggagtttgtcgccccactcggcgatcttctcaccctgccggctcttgatccgatcggcgttttgcaggatattttccaccgtcccccactcctgcaccagcttgcaggcggttttttccccgatgcccggcacgccgggaatgttgtccgaagcatcgccccacaacgccaggatgtcgcgtaccaactgcggattctcgatgccgtatttctcgcggatcgcctcccggccgacgatttcgataccgtcgttgcctttctgtttgtagatcttacagttgtcgcaaaccaactgtccgtagtccttgtcgggcgtaaccatgaaaacgtcgtaacccgcctcgacgcccttgtatgcaagcgtgccgatcacatcgtcggcctcgtaaccgggcacctccagcaccggaatacacatcgcctcgacgatccgcttgacataaggcaccgacaacaggatatcctccggcgtttcggcacggttggccttgtattcggggaaaatttcgcggcggaaactgccgcctttcgggtcgaacgcgacgcccagcaggtcgggatgttcccgtttctggatgtcgcgcagaaatttcgtgaaaccgaacaccaccgaggtattcatccccgcacgattgcgcatgggacgtcccatgaacgcataataatacttgaaaatcaatgcataggcatcgacaagaaagagttttttcatcggattctatcggttatcctcggccatccactcggcgaacgaagtcgccgtttcgtgcagacgcagggcgtggagcttgacatgggacggcaggtcggcttcgatgcgggcggcgaaatccgcgagcatattctcgcacgtaggctgataatcgaccagcacgatgcggccgaagcgacagccgatctgttccgctacacgggtgctttcggccgtgcggcgcatgacgaaagcgtggtcgaggcgggagaggatctgttcgttcacaatccgtttcagctctccgaaatccatcaccatgccgaacttgggattcgactcgtcggcgcaaggcgtccccttgaccgtcacgaacaggcggtaggagtggccgtgaatctcgcggcaaaggccgtcgtaaccctccagcgcatgagccgcctcgaatgtaaactccttggtaagacgaatgatcgtcggttttttctcattttccatagcctctgcaaggtagtcacaattttcgggattcgcaaggatgcaggacccgggagccataaaaaacgggacgcacccgcaggcacgtcccgtcgtttcctattcccgtcctcttttcaacgctccgcagcccggatgaaatcgatgctcacctggcgttggaaagcctcgttgagcgaaatgaaggtctgggtggtcgaaatgccctggatacgcagaattccgtcgaaaatggttttcatcaggtgttcgttgtccaggcagtagagttttaccagaatgttgaaatttccggtgatgaagtggcactccacgatttcgggaatctccttgagtttctccatcgtctgcatcatatacatcggatcctgcacgcaaataccgatcagagcgcatacgtcgaaacccagcatcttggggtccacgatcaggcggcttcccaggatcacccccgaatcgtgcaacttgcggatacgctggtgaatggccgcacccgaaatcccgcactcgcgtgcgatctcgaggaacggcatgcgtgcattccggacgaggtactggagaatcttcccgtcgatagcgtccaaagttgctttaggcatggaaaaactcgttttagtcggttgtaaacttatttgattacgttcatctccttaccgatcttcacgaacgctgcgatgcaacggtcgagctgctcggtggtgtggccggccgaaacctgcacgcggatacgggcctgtcccttcggcaccacgggatagtagaagccggtcacgaagataccctcgtcctgcagacgggcggcgaaatcctgcgacagtttggcatcgtagagcatcacggcgcagatagccgactgcgtaggcttgatgtcgaagccggcggccatcatacccttgcggaaatgctcgacgttcttcacgagcttgtcgtgcagcgcatcgctctcgccgagcatcttgaacatctcgatcgaagcacccactacggcagggggcagcgagtttgagaagaggtacgggcgcgaacgctggcgcagcatgtcgataatctccttgcggccggtggtgaaaccgcctaccgcgccgccgaaggctttgcccagcgtaccggtcaggatatcgacctgtccgcgcaggttgtagagttcggtgataccgcgaccggtcttgcccagcacgcctgccgagtggcactcatcgaccatcaccagcgcatcgtatttctcagccagcttgcagatctcgtccagcggagcggcgttgccgtccatcgagaagacgccgtcggttacgatgatgcggaaacgctgtgcctgggctttcttgaggcaatcctccagctcggccatgtcagcgttggcgtaacggtagcgaacggccttgcacagacgcacgccgtcgatgatcgacgcatggttgagcgaatcggagatgatcgcatcctgctcggtaaacagaggttcgaacacgccgccgttggcgtcgaagcaagcggcatagagaatcgtgtcttcggtaccgaaatagtcggcgatcgccttctcgagctgcttgtgcatatcctggcaaccgcagatgaaacgcacggacgacatgccgtagccgcgtgcatccatcgccttcttcgccgcttcgatcagacgcggattgtccgaaaggccgaggtagttgttcgcacagaaattcagcacctgacgtccgccgaccgtgatctcggcacgctgcggggattcgatgatgcgttcgttcttgtagagccctgccgctttgatttcggccagctcatgctccaaatgttctttaattttaccgtacatattgttagattttgtgacgttcgaggggtgttttactatcaaactatcagcaaagatagttgttttttataaaaatgatacctgtcgtcgaattttttatccgatcgccgccggaccccgtaccctccccgacggcaacccctgcaaatcccgggccccgcaaggcggtatccgacaaaatccggcccggattccgcaagtttgcgaccggtcgccgaagtcgtccgcgaacgaaaacggaataaacggacaacccgctatgttccaccgaaaacagagcgccggcacgaggcaaaaggacaaattccggcatcggaaagcgatccgcaggatcgtttcccgcccccgcaatctcaaattccccggcggacacgacgcatttacaaactattttgctaaatttgtcacgttatagccggttgtggaaccagcacgttcaaccattaaatatttcgaattatgttcaaaatcgattcttacgatttcaaaggcaagcgggcgattatccgcgtggacttcaacgtccccctcgacgacaagggccaggtaacggacgacacccgcatccgggcggcgatccccacgatccgcaaggtactcgacgcgggcggctcggtaatcctgatgtcgcatctgggacggcccaagaagaacaacgatatgaaatattcgctcggacagatcgtacccgcgatcgaaaagctgctgggcaaacccgtgattttcgccggcgactgcatgggagaaaaagcggccgaaacagcccgaaacctcaagcccggcgaggtgatgctgctcgaaaacctgcgtttctacgccgaggaggagggcaagccccgcggacttgccgaagatgcttcggaagaggagaaggccgcagccaaaaaagcggtcaaagcctcgcagaaagagttcgtcgagcggctggcttcgtatgccgactgctacatcaacgacgctttcggcaccgcgcaccgcgcacacgcctcgacagccctgatcgccgataaattcccccacgacaagatgttcggctacgtgatggagaacgaattgcaggcggtcgatcgtctgatgctgaacccccggcgcccgttcgcggcgatcatcggcgggtcgaaagtttcgaccaagatctcgatcctcgaaaacctgatggagaaggtcgattcgatcgtcatcggcggcggtatgtcctacaccttcgcagcggcgcagggcggcaaagtcggcaactcgctctgcgagcccgagatgttccccacggcactcgaaatcgtgaagaaagccgaggagcgcggcgtgaagctggtattctcgcccgatgcgctgatcgccgacaaattcgccgaggacgccgatacgcgccaggctccggtgaacgacatccccgacggctggatgggtctcgacatcggcgaggagggcaagaagactttccgcgaacacatcctgggctgcaagacgatcctgtggaacggccccgtaggtgttttcgagatggacaagttcgctaccggctcgaaagccgtggccgaagcgatcgccgaagccacttcgaaaggagccttctcgctcatcggcggcggcgattcggtggcctgcatcaacaagttcggcctggccgacaaggtgagctacgtctcgacgggcggcggtgcactgctcgaatacatcgaaggcaaggagctgccgggtgtggcggccatccgcaaataagccgggcacgaacagagcgcggtcccatcgaaccgctctccgtactgaatcgaaaacagacagaaaccttaaaatatttagagtaaacaaccaatgaaaaaaattcttttcgctgcaaccgttctttgtatgatgggctgccaaaacaaaccgaccaactcgacgccggcgctcgatccgtccaacatggacacctcggtcgcccccaacgagagtttctaccagtacgccacgggcggctggcaggctaaaaatccgctcaaacccgaacattcgagctacaacatgttcaacgtgctgagcgacaacaacgagattcgcatcaacgagctcttcacccagatgaccaaggagaaccctgcgaagggcacggtcaatcagaaaatcgccgacctctacaagctgggcctcgactcggtacgtctgaacaaggagggcgccgctcccgtcaaggccgagctggaaaccatcctgtccctcgacaagaaggaacaactcactccgatcctgtccgtgatgcagctgacttcgagctcgcccctgttcagcttcggtccccaggccgatctgaaggacagcaaagtcaatgccctctacatcggacagtcgggcatcggcatgggcgaccgcgactactacctcgacgccgagaacgagtcgatccgcgaagcctacaaaacttatctgaaccggctcttcacgctggccggactcgaagagtcccaggtaagcaaagcgaccgacgccgtgatgcgcatcgaaaccgaactggccaagaacatgcgttcgaacgtcgaactgcgcgacttgcagcgcatgtacaacccgatggcgaccgccgatctgaaaaagaactacgacgctatcgactggaagtatctcttcgactttgccaaaatcaatccggagcgtgtgatcgtctgccagcccgaatacatggaggcgttggacaagctgatcgaaattactccgatcgaggacctgcgctactacctggcatcgcaatacctcaacgccgcagcgccctacctggacgataacttctacgccgcatcgttcgacttctacggccgcacgatgtcgggcaaacaggagccccgcccccgctggaagcgtgccatggccattcccaacagcgccctgggcgaggccgtaggcgaaatgtacgtcgagaagttcttccccgccgaagacaaggcccgcatgatgaccctggtggagaacctccgcacggccctcggccagcacatcgatcagctcgactggatgagcgactcgaccaagatgcgtgcccgcgagaaactcgccgctttccacgtgaagatcggctaccccgataaatggaaggactactccacgctcgaaatcgacccgaccctctcctactgggagaatatccagcgtgccagcgagtgggcgacccgcgatcaactcgccaaagtcggcaaggcggtagatcccgaggagtggctcatgactccccagacggtcaatgcctattacaacccgaccaccaatgaaatttgcttcccggcagcaatcctccagccgccgttcttcaacccggcagccgacgacgcggtgaactacggcgctatcggcgtagtgatcggccacgaaatgacgcacggattcgacgatcaaggccgtcagttcgacaaagacggcaacatgaacaactggtggaccgatgccgatgccgaagccttcaaacagaagaccgacattctggtcaagcagttcgacgcgatcgaggtgctgcccgcacgcggcgaccagccggccgtcttcgccaacggttcgctctgcctgggcgagaatatcgccgatcagggcggtctgcgcgtggcttacacggcactcatgaacacactgaacggcaccgaacccgagccgatcgacggacttacgccggcccagcgtttctacttgagctacgcgaccgtctgggcacagaacatccgcgacgaggagatcgcccgtctgaccaaactcgacgtacactcgctcggtcaatggcgcgtggacgctacgctgcgcaacctccaggatttcttcgacgccttcaacatcaccgacggcaagatgtatatgccggtcgaggagcgcgtgattatctggtaattccgcatcgtttccataaaggagtgtgccgaaataggaatttcggcacactcctttttatatgcataagaattagccctatgcaaagcttcgaaggtgaggaagacaggagtttactcggtgtaaacgatcgagtccgaatcccgaagataacgcagcaatgggcaattatgacacaccgccttcttatcggagaaacaacgcgataagatcgcacagccgaaatcacgattttttcggctgcaacgccggttcatccaaacaccggaccttcgtcgcaaaaacgcaggaaagcgaataacgagcattttcgcgccatcgaagccctttccgaacaaaagtcgggacacatcctctcttctgccgaaacgacgtatcaggacgcaaaacctctcattcgtgtccaaccggagtaatgccggattactcgtaccatcggaaacatacccgcgatccgacgatatttccggacagagatcacgaaaaggtcccggacgtcttacgacaaccgggacccgcgatcaaaaaatctatttatgaaaaaacttttatgtattcaccgcctgcaaaaagggtgcccggaaaagtaaaacccggccggccccgcagcgtgcccgctaatatttgtagcggatccacttgtaaagctccttgaaggtaggtttcttgccgtacatgaagatacccacgcggtaaatcttcgccgcgagccataccatagccataaacgtagcgtagagcaccgcgagcgacacgacgatctcccaggtcggaataccgcacgggatgcgggccatcatcaccacgggcgaggtaaaaggaatcatcgaacaccagaagaccagcggcgaattggggtccttcatcaccaccatcatcacgaagatactcaggatgatcggcagcatgatcggggtctgcaactgctgtgcgtcctgcacattatcgacagccgaaccgacggcagcgaacatcgccgaatagagcaggtaaccaccgatcacgtagagcagcaggtaagcgaaaatctggaagacatatccgaaatcggtcgccgtggcgagcgtctgcaccatctccatatcgacgcccgccgccgtcggatcgagcgtcccggcacgcatcgcctcgacacttcccatcatctcggcagagatcaggtgcggcatgacgagcgcacccacgccgcacaccagcacgccccagatgagcacctgcaccaccgcgacggaagcgatacccaggatcttgcccagcatcagccggaaggggctgatcgaagagacgaccacttcgagcacccggttgttcttctcctcgatgaccgactgcatgaccatcgcaccgtaaatcatcaggaacatgtagaggatcataccgagcaccagccccacgacggtcgatacggccgacgaattggcctgcttgtcgctgccgtcgtcctgcatctggtcgttgcggaagacctgcatatagaccgtagtcttcacctcgtagagaatctgcgacagattttcgatgttatagtccttgagtttctccttctcgatgatgtcggcgatctgccccgacacgctctcctcgaccaacatcgccgaggagccgttggtatagagtttcacgttgccgggattggtcattatgtccccgccgatccagagtatgccgaaacggtcggtatgctctctgcgagcctcgtcgagcgtcaggtcggtcggctcatagaccacctcctcgctgctctcgagccggggagcgatcacaccgctctcgtcgatcacggaaatatgccgggtttccccctgggaatagcgcatgatgagcgccggggccaccatcaggccgatcatcagcaccggcataagaatcgtggtcacgatgaacgacttcttgcgcacccgttcgttgaattcccgggtaatgataattcctatcttcgaatttgccatggctttctacttttgcttgttcgttttcttccgattactccgcgttgagggttcccccgacggcccgtatgaagatgtcgttcatcgacgggatgatctccgtgaaggagcgcagctccaccgcatcgttgatccgggcgatcacctcccgcacgtcggcatcccgctccacatgcagcttgagcgacgaataggccgccccgaactccggctcgggctgttcgagcacctcgcagcgaccttcgagcacaccgcgcagcgcctccgcgtcgccccggtaggctacctgaaaaatgttgttgccgtgcctgcgccggatctcgtccacacggcccgtaagaatgttgcgcgacttgttgataagcgtgatatggtcgcagatctcctcgacggacgacatgttgtgggtcgaaaagatgaccgtcgaacccttgtcgcgcaagccgagaatctcctccttcaaaaggttggcgttgatcggatcgaaacccgaaaaaggctcgtcgaagatcagcagctcaggttcgtgcagcaccgtgacgatgaactggactttctgggccatacccttcgaaagttcgtccaccttgcggtcccaccacgattcgatgccgaatttgacgaaccacttcttgagccgcaccaccgcttcgtggcgcgaaagccccttcaggcgggcgaagaagacggcctgttcgcccactttcatctttttatacagaccgcgctcctcgggcagatagccgatgcgatagacatcctgcggctggatttcgcagccgtcgaagatgactttcccctcgtcgggcgccgtaatgcggttgatgatgcggatcagcgtggtcttgcccgcaccgttgggtccgagcaggccgtaaaccgaccccttgggaatcgtgagcgacacatcgtccagagccgtatgtctggcgaagcgcttggtaacgtgttctactttcaatatctccataatcgatcgaaaacttaaagtgagtccgggcattccgtccgcgatttcctacatctccggctgtaccgcataaggacaatacatcactacgccctgctgtcccaccgcctcacggatcttgcgccactcgccggcccagggtcccagttctccggccacgatgtcggccttgactttggccatgaatccggagaagaacgccccgaagccggtcggagcctcggtcatctcgacgatgcggaacttatcgcccaattcggccttgtcagccgcaatagcgatggctgtcttcagaccgccgttggtatccaccaacccgagagcgagggcatccgtgccgctccaaacccgtccgccggcaatgtcgagcaccttttccagcggcagattacggccttcggccacgtaggaggtgaaagtttcgtacacctcgtccaccgagcgcatgatcgccgcccgttcggttcccgtcaggggacgcatcacgcccatatcggccgacgtattggttctcacggcatcgaacgtaatgcccagcttattcttcagggcatcctccaggcgcaggaacattccgaacaccccgatcgaccccgtaagggtcgtcttgtccgccacgatggcatcggcaccgcacgaaatatagtaaccgccgctggccgcatagctgcccatcgatacgatcaccggcttcttctcccgaagcagctccacctcgcgccagatcacatccgaagccagcgcgctgccgcccggcgaattgacacgcagcaccacggccttgacatcgtcgttgcgacgtaccttcgccaacttcgcagccagcgtattgccgtaaatatcggcaccgtagccttcgccatcgacgatcgcaccgtcggcatagacgatcgctatctgcgacgaagagatattcttaaggtccgcattcagttgcgacacgtactgtcccaacgtcacgaactcgaactgtccgtcgttcttggcgacggcgccgtactcccggaacacatcgtccatctgatcctcgaacagcaatccgtccaccatcccatgatcgagcgcctcctgtgccagcgacacttcgagcccgtcggccagtcggttcaaggtcgaaagctcgataccgcgcgactcggcgacggcctccgccatcacattccaataggaatccaccaacaactgcatctgctcgcggttggcattcgacatcttcgaaaggaaataaggctccacggcactcttgtacctgcaggccgtcggacggaaaatttcggcctgaatatcgagcttgtcgaaaagacccttgtaaaacatcagcgtcgaagaaacacctgtccactgcatccctccgtgaggctccaggtagatcttgtcggcgaccgatgccagatagtatcccccctggccgtaggtttcgttataggcgatgatgaacttgccgccctgccggaaatcctgaagcgcctcgcgcagctcctccagaatggcgtaagtggcgactccgcctccgttcggacgcagataaataccctggatgcggggatcgttcttggccgtttcgatggcccgcaacgcattgtaaagagtaacctggtgtctggccgtcatcgtggcgaaatcgatgccggcgaaaggatcgctgctcggcgactcgatcaggtcttccgaaaaatccagtttcaaaatcgcgtgctctccgaccgtcaccggttccgaagaggtcatggaacctacgattccgaacaaaatcaccacggaaagaaagagcatcaccgcactgcccacgacaaaagcgagcagaccggcgaaaaacattttcaaaaatttcataccgatttatttaatattcattcgctgcgaaacggcgcatgaggcgcgaacggggcgaaacttttccgcatcgccgaatcccggcccccctccgaatcggagttaatatgcggcaaatataaccgttaattttatgaaaaacaaataatatttatcgtttatcgataacataattttccataaagacttattatatcggaaataatagttatctttgtccagataagccgcatccggacgagcaggagcaggctctttgccgcccggtttgcacgatcgttgctaccaacttaactgaaaatatggaagagagagtcaaggaattactcaaccgtatcctccatccggagacccagcacggtcttgtcgagagcggattcgtcgaacaggtttcgactcccggcgacaagataaccgtcaccctgaatttcgccaaagtgcgcgatcccttcgccctgaagatcaaacggcaggttcaagcactgctggaagagaattttcccgccctgaaaggatccatcaccgttattattaaggaggccgctcccaagaaaccgcaagctgcggacaaaccgaccatgacgggcgacatagcccacatcgtagcgatcgcttcgggcaagggcggtgtcggaaaatcgaccgtcacggccaaccttgccgtcgccctgcgcaaccggggtttccgggtcggcatcctcgacgccgacatctacggcccttcgcagcccaagatgttcggtctggaaggttacctgcccgaagccgaacaggtggacgggcaggatatcatcctgccggccgaaacgatggatatgaaaatcatgtcgatcggcttcttcgtgaaaccttcggacgccctgctgtggcgcggtgcaatggcggtgaacgccttgcggcagatgatccaccagacacgctggggagcgctcgatttcctgctcgtggatcttcctcccggcacgggagatattcacctctcgatcatttcggagttgaaaatcgacacggccgtgatcgtttccaccccccagcagatcgccgtggccgatgtacggcgcggcgtggagatgttccgcaatccgcaggtgaacatccccctggccggcatcgtcgaaaacatggcctggttcacgccggaagagctgcccgaaaaccgttactacctcttcggaaagggaggcgcccgccgcttcgccgaggaaaacggcatagacctgttgggagaaatacctatcatacagtccattatggaaggcgccgatacgggaacgccgtcggtgtcgatcgacgcccgcgtcgaaccctactaccgggagatagccgaccggattgttgataaggtggtcaaataaccccacgaacgatgttgataaacccgcaataacttttgaaaagaaaaacccggaaccgtttgcaaaatccatctttcgcccggtatagacaaaacaagaaaacggcaaaaaaaagttttcgcaaagtatgattcgggatatgcacggaaaaagagaagcgaatgttgataatccgaacatgtcgaaatgtcgaaacctgttttgaacatttgtcggtaactttccaaaaaacgggtttcgacaacctcccggaccttatcggcagaacagaatacggaacttcgaaaagctatgctgtggataacccgaaatacggtataattatcaacactatcaacaggcattatatttacttttaattatttttttaataaaataaaagtataaaaaataaaaaacgatggtcgataactcatcgaaactcaaaacggaaatcgagcggctcaaacgcgagaagaacgccgttatcctggcgcactactatacgctgcccgaagtgcaggaagtagccgatttcctgggcgattcgctggcgctctccatcgaggcgcagaagaccgacgcccggatcatcctcttcgccggcgtgcatttcatggcagagacggccaaggtgctctcgcctgaaaagaaggtgctgcttccgaatctcgaagcgggatgttcgctggcagaatcgtgcgatgcggccgctttcgcggctttcaaggcgaaatatcccggctacaaggtggtttcgtacgtcaatacttcggtcggggtgaaagccttgacggatgtgtgctgcacctcgtccaatgccctgaaggtcgtagagtcgattccggccgaccagccgatcatcttcgctcccgaccggaacctgggttcctatatccaaaagctgactggacgcgagaatatggtgatctgggacggcgcctgccatgtgcacgaggagttttcgttggaaaaaatcctggaactgaagcggcagcatcccgcagcgcaggtggtggtgcatcccgaatgcagggcctatatcgtgcaggtggccgatttcgtcggttcgacggcggctattctggactattgcggcaaaagttccgccagggagttcatcgtggtgaccgaagcggggattctgaccgagatgaagcgccgctatccggagaagacgtttatcccggcccctcccgacgacgaggcgtgcggatgcaacaattgtaggtatatgaagatgattacgctggagaatatcttcaccacgctgcgcgacgagcggcccgaaatatcgctcgacgaggaggtacgccgccgtgccgagcgttcgatcctcaacatgatcgccatcaagtaggtttttcgctcgccggagggcgatcctccggtcgcacggcctgtgcggttacggaggcggaacggcggatttccggtcggcggccaaagaggagaaacgagggagaacctgcccggccggttgcggcgaaggacgaaaaaagagaacaggggaaggaacggagagagtgcggcattccgatccggttgggcggatgcggagccggtcgtatgaagtgcgaacagagaaattcaactatatattttttataaaccaagtaaacaaacattttaaggagagatgaaaaaactgattttatgcctggctgcggcagtcgtatcgctgactgccgctgcagacgagggtatgtggcttctgccctatcttcagaagatgaacatcggggatatgaaagccaagggctgccagctcacggccgaagatatctattcggtgaatcacggatcgctcaaggatgcgatcgtcattttcggtaacggttgtacgggcgaggtcgtatcgcccgaaggactcgttttcaccaaccaccattgcggttacggttcgattcaggccctctcttcggtggagcacgactacctgaaggacggtttctgggccatgtccaacgaggaggagctgccggctccggggctgacggtcactttcatccgtcgaatcatcgacgtaacgcccgaggtgctgggcaacatcccctcgatcgccaagggcgaggagcgttcggaaatggaggataagaacatcgaggcgctgtacgagaaattgcgggccgagaatcccggcatgacgatcaacatccagccgttcttcggtggcaaccagtacttcgcgttcgtgatggaggtttatcgggacatccgtctggtcggtactcccccgacgtcgatcggcaagttcggcggcgaaaccgacaactggatgtggccgcgtcatacgggcgacttctcgatcttccgcatctatgccggcaaggacaaccgtccggcggaatattcggaagagaacgtaccctacaaggccgaagagttcctcaaggtgtcgctcgacggttacaaggccgacgatttcacgatgatcatgggcttccccggttcgaccgagcgttacatgacttcgtacgagatcgacgagatgttccaggtttcgggtccgcagcgcatcgacattcgcggcgcccgtcaggacatcctgaaggaggacatggccgccagcgacaaggtgcgtatccagtacgcttcgaaatatgccaattcgtcgaactattggaagaatacgatcggcatgctgcgcggtctgaaaaaactggacgtgaaagccttgaaggaggcgcaggaagccgaattccaggcttgggccgagcagaatacgctgcctgaagagggattcgtcgatgcgctcggcatgatccgcgaggcggtgaacgacaacatggcctacaccggtccgctccagtatttgagcgaggcgatggtccgttcggtcgaaatcatgaccccggctctggtggctaaccggatgctgacggccgaggaggtaagcgacgaagcgaaagcgcaggcgaaggagtattacgccaacttctacaaggattacaacctgccgacggaccgcaaggtagcccggaagatgctttcgatggtcaaggagaacgtgaaggatctgccgaccgttttcgcggaggtgatcgacgcgcagttcggcggcgacatcgacgcttatgtggattacctgtacgacaattcggtcttcacggacgaggccaaggcatcggccgctacgtccgagcagatcaagaacgatccggcggtagtgttggctacgtcggttctgaacaagatgaaggagctgcgcgagaaggccgtacccaacctgcagaaatatgcggacggacatcgtctttacgtagccggtctgatgcgcatgcagcccgacaaggcctggtattcggatgcgaacttcaccattcgtctgacttacggtcaggtgttgccttatgaacctgccgacggcgtggtatatgattactacacgacgctcaagggcgtgacggagaaggaggattcttcgaatcccgaattcgtcgttcccgccaagctcaaggagctttacgaggcgaaggatttcggtccctatgccaactgcaagggcgaacttcccgtagcgttcctggccaactgcgacatcacgggcggtaactcgggttcgccgatgatgaacagccgcggcgagctgatcggtctggctttcgacggtaactgggaggctatgtcgggcgatatcgccttcgagccggatgtacagcgtactatcggcgtggacgttcgctatgtgctcttcgtgatcgacaagttcgcgggtgcggactggctgctcgacgagatgaccctcgtgaagagcgactgcaccaaggcatgcgatcagaaggatgtgaagaaaaaggagacgaaggcttcgaagaaaaacgccaagaaagcggacaagaagcgtaagtaactggaaatacggcgaatgtgcgtttgctttgcaggcgcatgtccgcgaatcgaaaaggggagaacgctgcgagcgttctccccttttcgatgttgaaaaacggtcggatgaaatttacgcattgcggggtatgaaaaccgtccttcttttcggatcggtttgcagaaataaaataaatgactatttttagaatttcattcgtgcggataagtgagatagagatgaagacgaaaaaaggaaaggatatgacctgcgaagaggtcttggagtggcttgcggcccatgccaatccggagttccgggagggaatggtgcggttcggaatcgacgcccggctggcggtcggggtgcgggtggtcgatctgcggcgtctggcgcgggagatcggccgggatcatgcgctggcgctggaactctaccgcaggccggtgcacgaagggcggatcctggcgtcgatgatcgccgatccggcgctgttccgtccggaggagatggatgcctgggtcgccgaatttcggtcgtgggacctgtgcgaccagtgttgtatcaacctgttccgctatacgtcgtacgcttacggcaaggtgcgcgaatacgccgcttcggacgaggagtttacccgacgggcggggttcgctctgctggctacgctcgccgtcggggataaacgggcttcggacgacgatttcagggcctttctgccgctgatcgaacggggtgcggaggattcccgcgtccggatcggaaaagccgtgaattgggccctgcggcagatcggcaaacgtagccgggggctttaccccgatgcgctggcgctggcccgtagactggcggcgaaggagggggcggcagcccgccggatcggacgcgatgcggtgcgtgagctgacgctggagaggatcatcgcccggatcaaatagggtgcagacccccttgcggaaaggctttggaaagaaaaaggctttccgcagcgaaaatcaccgaaacagatgctatctttgggcgaaggataagtcgatccgctatgatgaaagagtctaaattcgtacgcaccaaaatcgtcgtgggttacgtgctgatcgccctgatcggcctgacggccatgatctacgtctggcgtcagaccggagcgctcctcgaaccggaccacagccagcaggagcttcggcggcggcgcagactggtcaatcagactctctaccatctctatgaggccgaaacatacggtcagatgctggtggccggttatgccagctacgagaatcgttacaaacgcgaactccggctggtacgggagtgcatcgattcgctccgtatgcgtgcggacgacgagtcgcagcagatgcgtctggacacgatcgtgcggctgatcgccggcaaggagcaggggatcaaggctctggaccgcaacctgcgttcggcgggcacggcgacgttgttgagcgaaaatatccagcggatgattcccatgctggactccctgtcgcaaccgactatcgaacccgatacgatcctggtccgcgatacggtgcgcgtggctccgaaaaagaagcgcaatttcttccgccggttcggcgacctgttcagcccgcccaagaacgattcgcaggtggtggtgaagacccgggtgcggatcgacgctccgcctcggcagatgagtctgggggataccatcgccgtagtgctgcaggatctggagcagcgggtgaccagcgagcggctggccctttacgacaaggcgtggcgggaggggttgcggctgcaacgcaacaaccagcagatcaatcagcggatttaccgcctgattatcgacttcgaggaggaggagacggcctatctctgggagcggatgcaggctcgtgaacaggtgcggcgcagctcgctcgtcattctgggctcggtggctgccggatcgctgctggtgatgctgctcttcgtcggaatcctctggcgggacgtgaaccgcagcaaccgttacaaacgccagctcgaagcggccaatcgccacaacgaagccttgctggaggcccgtgagaagctgatgctcaccattacgcacgacatcaaggccccgctgggttcgatcatggtctatatcgatctgcttacgcgtctggacctgggcaagcggggtgcgctttatctggatcatatgaagagctcggccgatcacctgttggagttggtgaccgacctgctggatttctacaaactcgactccaacaaagtcgccgtcaatcgcatcgccttctctccggccgatctgtttacggctgtctgcaccgggttcgagccggtggctgcggccaaaggaatcgaattgcggtgtacgctcgccgccgaactttcgggacaggtcgcgggcgatccctcgcgtgtgcggcagatcgccgagaacctgctttccaatgcgatcaagttcaccgaccgggggttcgtcgcgtttgacgcctggttggaagaggggcggctgctgttccgtgtcagcgatacgggtcggggaatcggccccgaggagcgggagcgcatctttcaggagttcgtgcgcctgccgtcggcgggcggcgtgagcggcgtagggctgggcctctcgatcgtcgatcgtctcgtgaagctgctcggcggtacgatcgagctggagagcgaaccgggtgccggaagccgattcctggtcgccgtcccggtcggggaggcggaggacgacgcttccgaaaaggaagccgcagcggggatgtgtccgggcagagtgtgtatggagggcggacgacccctccgctgcctgctggtggatgacgaccccctgcaacttgagatgaccgcagttctctgccgggagttgggaatcgaaacggagagctgtccttttcccgaatacgctgaaaaattggtgcaggagtctgctttcgatctggtttttaccgatatacagatgcccggagtggatgggttcgaggtgttgcgacggattcgggccgttcgtgcggagctgccggtggtagccgtttcagcccgttcggacgatgagtcggcctatgtcgaacggggatttgcagccgtgctgcggaaacctttcgcgcgggcggaactggtggccgtgttacgccgtgtcgtgccggaggcgggggttgccccggaggagtgtcttccggaagaggatgcggttcgcgggttcgaagctctgacggctttcgcccgcgacgacgccgaagccgcgcgggagatcatccggacctttgtcgccgagaacgaggcccatgccgaaaccttgcgccgggccgcgctcgccggagatgcggtcgctttgcgtgcgatcgctcacaaaatggtgccgatctacacgttgctgggcgaggaggagctcgctgcggcattgcgccgtctggagcgttcggaaggttctgcggacggggctttgcgcagcgcagcgctcggtgtagcggaaagggtcggcgaaattgtccgggcggcaaaaaaagagtatctttgcgaccgttgatctccgccgggggcgtattccgacagaaggccgtccgttcgcatcatgcccggacgggaagttgcagaggatcggacgcttcggtgtcggacgatgccggagaaggagcctcgccgaagaggagcgttgcgggaagcctctgcggatggcttcggtttttttgaatgaaatttcggtatggaaaagatattgatcatagatgacgacgtaaccttttcgctgatgctgcgcacgtggctcggcaagaagggcttcggagtcgatacggctgccgacatcgccgccgggcgccggcttctcgcggaggggagctacgatctggtgctttcggacatgcgtctgcccgacggggacgggaccgatctgttgcagtggatcgccgaacggggcgtgacgatacccgtgatcgtgatgaccggttatgccgaaatccgcaatgccgtggtgagtatgaagctcggcgcaagggactatgtttccaaacccgttcagccggacgagctgctccgcaagatccgcgaggcgctggatgccccgcaccccgaaacggctatgcccgcatccgcagcgatggctccggcgcccgcgaaaccgcgccggaagggggacagggccttggacgaaggcgaattgaattacatcgaagggcacagcgacgcttcgcgtaaactgtacgaatacgtccgtctggtggctcctaccaatatgtcggtgctgctcgaaggggcgagcggcacgggcaaggagcacgtggcccggttgatccatctgcgcagcaaacgggcgggcaaacccttcgtggcggtcgattgcggcgctctgtcgcgtgaactggccgcttcggagtttttcggccatatcaaaggctccttcacgggagcgctgtccgataagaagggcgctttcgaatcggcgcagggcggtacgcttttcctggacgaggtgggcaacttgagctacgaagttcagatccagttgctgcgagcccttcaggagcgcagaataaaacccgtcggagggttgcgcgaaattccggtggacgtgcgtctgatctgtgccacgaacgaggatctggaggcggctatcgcgcgcgggtcgtttcgtgccgacctctaccaccgcatcgatgaattcgtgctccatatgcccgatctcgcggagcgcagggaggatattatgctctatgccgacttttttctggaccaggccaaccgcgagctcgacaaacacgtggtgggtttcgatccggaggctgaaaaactgctcgtggcctgcgactggcccggaaatctgcggcaactgaagaacgccgtgacccgggcggttctgctgacgacgggcgagtacgtcactccggccgagctgcccgccgaattgtcggaggctgttccggcgccgatcgctttgcgcgatccggcgggagaggaagagcggatccggcgggcgctggcggcggccggcggcaacaaatcccaggcggcccggctactggggatcgatcgcaagacgctctacaacaaactgcatctgtacggcatcgaatagtcgtcgggtgtggaaatattccacatcattttgggaatttccacaccgttccacagccgcatataaaattatcaatttcttatatctttgattaacagcataatgatttatgccggcggattggcatacaccttgacgatgtaatgaatacagaggttggggaaccgaaggaaaaaaattattttttagttaaaaaacaatcgcaaaatgaaaaagttattcattgcagcagctgtaatcgtaatggccggaagcatggcttcctgcggtcagaaaacccagaaggccgcccaggatacggccgcgacggaaccggtagcgaccgagcaggtcgaggctgtcgagatcgaagccgtaacgccggaatccgagattcctgccgctgcagagagtcagaaaacacaaccggagcaggcaaataataagtagtaatttggagggttattattagttaaacaattgttgcttgccagggggcgtaccgacagcggtgcgcccccgccattttgtaccgggacggaattcgaattgtcgggatgggaacgatgcggcaggtttcggtatcagttggggaaatccgacgattatttcgccggatatggatcttctccggaagttgttgtgtaaaagtttgtcccggtatcggatggttcgcgttcgatttatttggatgtcgtggatgttttggttatatttacaatgtcgaagatagtcaccaatggcctgattataaactataaattatttttgctatgaaaataataattcattattttttgttgtttgtcgcattggttgcaacgaccggatgcgataaggacgataattattatcccgctccggaattcgagggagatccgacggctgaatatattgaagcgaatgtcgatttcgatacgcagatttctcaggaaaattccgatccagatactttttacacctatttttgtttgtgcaatgccagtgaccacaaaatttacttcactcttacgttttgcccgacaaaaaacgatgaatttatagaccatatgaatgggcttgtagatcccggaaaaaaatatacaaacagattcgtaacatctaattggtctatggatgtaccgggtcttatcaccaccttttctcctcttattacggagatggaggtctattacgatgtcgatgacaaatatgggcctgttagatttccatcgggaatagaggagaagtattcggattttacgcagcgtttcaaaacccggcagatttgtgatccggggcagtggatttacgaagagttcacgccccgccgggcgcgttggacgtatattctgaccaacgaagattatgaacgtgccaaaataatttcgggaaaataggactgaaaattcgcggcgatcggttacgactgatttagcttgcattatgaagaggactgcattgcgcagccctctttattttatgattcgacttgcatcatgcggcaaggcggattttctgtttccggtttgacccgtttgagtttttaccggatgctttgcgtacggcctttcgggaatagggcgactgggaaataatcaatagaaatgcccgctgggagcgaagatcgcgtagccgaaattgaaagtgaggtacatattgtgccagctcttcaggtcgtatttggtgagcgacaggctgaccggtccgatgggcgtgtgatagacgaacgaggcttcggtgatgtattgcatcttttcgccgggcagcccccggttgtcgcggtacatggcataaaatcccgtgcgcaggaagaaattgggcagcagatcgaaagtgggcatcagaccgccggccaggaagtttttcgcccggtagtcgggcatgaaagccatctgggagtgtacgacgggctgataggccggcagcgacatcaatgtagccgtttcggtctggaaccgggggtgcgtggtccagacggcgtcgatgttgaatccgaacgagaaccatttgcagccgggcaggtcgaaatagtggttccactggaatttggcgccgaaccattcgcggtgggcattgaaacttcgcttacgtccgaattcggcgggtttgtaccgttcgcgccccgtgatgtagatgcccgagagggatatttcggacccccggcgcgggtagagaatcttgtcgagcgtgttgcgggcgatatccagtttggtgccgaagaaggagaagcgcgtcaggtcggtgtcgggatccgtgtcgggaaagggggcgtcgtagcggtaggcttgttgtcctccgttgaaccgcagcgatgccaggctgttgtgtgtcagaggcatggtgagtccgatggagaggaatccctggttgttcttgaccgatttggtgttatcgatcggcgtgaggttgccgaagttgccgtgccgcaggttcaggacttcgaaattgtaggaatagtcgagcgagaagggtttccaaaggtagaagtccgtgcgcccgcccagcgaaccggtcgcataggtcgggccgatgtaaataccggcgaaagcccattgcgacacgcggcggatcgtgtggtagtcgaaaccgatgaatgcctggttgaaagccgtcgaggagatgttgccgccgatcaggaaccggaggttttcgcgtgcggacatcttcagcttgaccgaataccgttcccgcagcgggtcgtaccggaattcggggtattcgaccgaaaattcgtcgttgcctatgacggagaagaagtcgtcgcggaattcggggaaactcatctgccgctgccgtccgtcgtaggtgtcgtccagccgcatgacgtcgcgtacataggccgtttgtgcatgggtgagtccttcgaactcgtagtcgtcgaagatgatcgggggacacttttcgcggaaagccgcccgcttggtgcggatctcttcgggcgtgacggtgcggtggattttctcccgcagggccggaatccgggccagtgcgtcgcggtagcccgcttcgatgatcgagtcggcgctgttgaaatcgagcatgctgacattgacggcccggttgatcatcaggctgcgtccttcgggcatgtcgtagttggtcttgttcatggccagcgagaaggcttgatcgacgagcgaactgttctccgtgatgtcgttgtttcccgacgtgcatttgctgccgatcaggaaatcgggatggaactccttgtcgaggggttcccaggggaagttgtcgtagatgccgccgtcgtagagtagcatcgtgtcgattttcatgggtttgaacgccagcggaatggacatcgacgaacggatcgcttcgcccatgtcgcccttgcgcagcaccaccggacggcgggtgttcatatcgctcgccacgcagaggaacggcaccatcaggctgtcgaagtcccgccgggaagctgtcgtggccgggccgaacaggtcggcgagggccaggtcgatctgattcgaggagatcaggtacgaaggcaggcggaaacggctcgcgttggggtcgtccgggtggtccttcatgttgaggcggatcgagaggaagatcggggtgccggtattgcggcggtagtagggcaggtagctggggtcgatgcgccccgaaacccactgtttgaccacacccgaagcgacgatccggcgcatctcttcgggggaatatcctgcggcgtacatgcccgcgatgatcgaacccatcgaggttcccgacacgtagtcgatcggaatgccgctctcttcgagtgcctgcaatacgccgatatggtaaagtcctttggctccgccgccgctcatgaccaccccgacgctctgggccgctgccggaagggtgaaaagcattcccgccgcgagaaaagagaggattttccgcttcatatcctgatatttttattaactttgcctattaaaccgtgcgtaaaagtacaaaataaagcgtaaactttaggttatgaacgataaaatcaacgagctgctcgaacgggtggaggcattcaaacccaaagctgcggccgagatcgaggatttccgaatccggatgctggggaaaaaaggcgagctgacggcccttatggaggagttcaagagcgtggcgcccgagctgaaacgggagttcggccagaagctcaacaaccttaagaaccggacgcaggagcggatcaacgccctgcgggggcaacttgcggacgccgccggggactcctcgcagcggattcccgacatgagccgtcccggttctgcggaggagctgggttcgcgtcatcccatttcgctggtgaccaaccagatcgtcgaggtattctcgcggctgggctatacggtggccgagggtcccgagatcgaggacgactggcatgtcttctcggcgctcaactttccgcccgagcatccggcccgcgacatgcaggatacgttctttatcgccaagaaccccgacgtgctactgcggacccacacctcgtcgattcaggtgcggacgatggagcggcagaagccgccgatccgggtgatctgcccgggccgcgttttccgcaacgaagcgatttcttaccgcgcacactgcatcttccaccagatcgagggactctatatcgacgagggcgtgtcgttcgccgatctgaaacagtcgatcctctacttcgccaaggaggttttcggcgagaacgccacgatccgcatgcgcccctcgtactttcccttcaccgaaccgtcggccgaggtcgatgtgtcgtgcaacctctgtggcggcaagggctgcaacgtctgcaagggcacgggttggctggagatcatgggctgcggcatggtcgatcccaatgtgcttgaggccaatggaatcgattcgaagaaatattccgggttcgcgttcggcatgggggtcgagcgtatcgccatgctcaaatacggcgtgaaggacctgcggctctatttcgagaacgacatacggttcctgcatcagttcgatacggtgctttaagcgctgcggtacactccccgggtcggggagcggcgaatcgcccgccggatgccgggatgttccggggatgaagttccgtatcgttcgcgggaatacgaaaagcggttctccgacgttttcttgacagacgaagggaggggctgcgtcttgttcattgcactcttccggcgaagaacgaagatacaaactcaacgatttcaatgaagcggatgcttgcgattctggtgctctgcacggctttctccacggggttcgtcccgcaggaggaggcgttgcccgcacctgcggcggaggcctcgtggcccgactcgctgcgaccgaccgaatactataccgagggtgtgaaaaaactcttgatcggagaggacaccctggcggcccgggcactgttcctgcaggccctggagctcgattccgcgtatgctccggcctggttccgcctctcttcggtgactcccgacggcgatccgcagggtacggcgtgggcacggcgtgcttaccggctggactcgctcaacaagtggtacgggcagctttacgggcaaaagctgcttgctgagggagaactcgacaaggcgcgtccgctgttcgtgcggctttcggcgctcgacccgaccaatcccgacaacattcgtattctggcgatcctgtaccagcaggccgggatgccctattcggcgatcgatatgctcgattcggccgagatgcgtttcggtaaaatgcctttgttgggggcgatgaaacgccagttgctgattcgcacggggcagttggaccgtgcgctggccgaagccagggagatggccgaggcgattccttacgaagcggaaaaccacgtgattctggccgacctgtacggtgctgccaaacaggattcgttggccatagccgagtataaccgggcgttggagatcgactccatgaatgtcccggcgctggcttcgctcgccgaattctacaacaagcgcaacgattcgcatgcttatctggccgtgtcgaaaaggcttttcgaaatcgacgagctccccttgtcggaaaaggtccgcattttccggcagctgacgctcgacgtccgtttttaccgggacaacttctttcagctcaacgacttgatttcgacgcttgcgatccgctatcccgacgataaggacgtcgtcgaactgtatgcgcagcacctgatcaatgccggggagctggagcaggcgctgaccctctacaagctgcatctggccgaccggcctccccagttggactattaccgtgcggtgatcgacatcgaaacttaccgcaagcggctcgattcggtttatctgtatatcgaccgggcgctcgaggttttccctggaaataccgagctgtatgcccgcaagggacacgcccaggggtataccggaaagttgtcgcaatcgatcggcagctataaaaaagccctcaaatatgctgatgcggactccctgcgcggagccgtgtggggatatatcggcgacgcttatcaccagatggaggaggccggacggaaggactcggaacgggacaaataccgccgccggtgtttcgaggcttacgaccgttcgctgcattattactacgataacccgatggtgctcaataactacgcctattttataagcgaatcgtcccgggatccccgtcagctcgaccgggcctttgccatggcagcccgtgcggtggagctggacggcaacaacgccacgctgttggatacctatgcctgggtgctgttccgtcttggacggctgcaggaggctcgtcgaacgatgcagcaggcgatctctttcgaccgcagcgagaatccggaactctacctgcattacggggacatcctggcggctctcggggagaagttcatggccgaaacctactggcgcaaagcgctggagaagggatatgacgatccccgggcgatcgaagagcgtatccggcaactcaaatccaagccctgactatgcgacaagccttgaaccattcgtatcgtttcccgcagcgggcggagtcggtccgcacgctgtgtatccgtttgccgaaggtcgttttgtttcttttccttctacttggtgcagggtcgcttgcggcccagaataccgaccagcagatcgcggcgcagaaacggttgatcgccgacctcgaaaagcagatcgcccgggaggaacaggagatttcgaagctcaagaagggacgtgcctcggccgaggagacggtgcgccgtctggcccgtcagatcgattcgcgcaaccagctgctcgacgtgacggagcgggatgcccgtaagctcgaggtcgaggtggcccgtacggacagcgtggcccgggggctgtcggcatcgctcgacgcccataaacggcgctatgccgagatggtgcgcgaggcataccgcaactacaaacacaacaattatctgacctacctcttctcttcgagcgacttcaatcaggtggcccgccgcatcaccaatctgcgggaggtggcggccatgcgggaacggcagatggagcagatcgtgacgctttcggagcaggtgtccgtcgagcggacccggctgaccgggcagcagcgggcgctggattcggtgaagcgcagcctgaccacgcagcggacccgcctgcagaaagattcgcaggcggcgcgtgccaacatcaagcagctctccaagaaggaaaaagctgccctgcaacagaaaatcgcccgcgagcaacggctcgacgtggcgatcgacgagctgcgcaagctgacccggggtaacaaggagggcaacacctttacggcgaagacttcgaatctgcggctgccggtggtcggcggcggggtgaagcgctacaagggcaatatggccgagatcgcggggccgaagggggcgcaggtgatttcgatctacgaaggcaaggtcgtcgaggtgaaacgcaaccggatcaccaacaaatacgacgtctatatagcccacggcgaatacatctcttcgtatgccaacctcaattccgtgacggtgggcaaggacgacaaggtggcccgcaaccagcagatcggaacgatcggatcgggggtcgatgtgacgaccatgcagcccgagtacaagatggtgttcggtatttacggaccgtcgcccaaagtgcagatgcgtgcttcggattgcttcaaaaaataaccgtctatggccgtacgctattataccgatgactgtacctatcgcctgccgcagaaacggctcacggccgtgtggctggaccgcgtagcccgggaagaggggtatgaactgggggatgtgacctatattttttgctcggcggcccgcctgctggagatgaaccggcagttcctcgggcacgactactataccgacgtcatcacgttcgattacagcgaccgcaagggcgcccggatcgtgtcgggcgacattttcatcgacgtggaaaccgttgcggacaatgcacgcgaatacggcgccgcgaagctgaccgaaatgcgccgcgtggtggtgcacggtttgctccatctgtgcggacagaaggataagacaccccgtgcgaacgctcaaatgcaccgcaaggaggatcgctacctccgacagtgggatgagctgtccaaagggctgaaatagggctttgcgaggggattcggtcgcggggttacgggccctttcccggcaggattatttttaatgcctgaaatatcccgtaaaatcgttcgaatatatcatacggtcggttctttcccgacggcgggatgggcggctcaaggtgctgaaaagacggtttgcagagggagccggccgcagggttgcgaactctttcacgaaaggatgtatttttaacgcctgaaatgctccttaaaatcgttcgaatataccataacggtcgttctcacgacgataggatgggccgttaaagacgctgaaacggcggtttatgggcggattcgtcttttgtttggaaccggttcccgaagaaagatggattttccccggcaatcgtatatttcaatgtccgtcattcgacgttcgttcgttcgcggccggaggccgtgtctgtaatgccgactctctcttaagtcctttcttcggaggggaattcgggtcgctgcgcctccaaaaaggacgctgtaatcgcgttttccttcgttgggactgaagcggacgactttgcttgcgggaagtgccggctgcggtggctgcggcagcagttgtgggggctgtcgatcgggtccgctgcgcggcgaatcggtagccgggagaggtggactgcgaagattcggctttcgtaggaggcgtttccgccgtgcggggacggatccggccgttggttgtgtccgcaaccctttaatcgtttgtattcttccggaatgggcggcatggattgtcggctccttgccggagagaagtttatttttgcgggaaaatgctgacaaagttcgggattttcccgcgcgggtcgccggagtgtgccggaagcgggagaatccgtttttggcgggacagcccgtgcttgccgatcttttcggcgctgcggcgacgttttgccgtgaggttgccgttttcgatccgactttcgccgtcggacggcggatagttgggcgaaagttgccgttgcgtgcggtttcggctttttcggataagcgactttgttcgtatctttgccgtgcggcggtcggtcgtcggattgacgggcggcggtgttttccgcaattcatggaaaaggagatatggttttacattacgatatcatcgtggtcggcggcggtcatgccggctgcgaggcggcttcggcggcagcgcggctcggctcctgcacgctgctcgtgacgatggacatgaccaagttggccgatatgtcttgtaatccggccgtaggcggtgttgctaaaggtcagatagtcagagagatagatgctttgggagggcagatggggcggattaccgaccttacggctgtccaattccgcatgctcaaccgctcgaaaggggcggcgatgtggagtccccgggcccagtgcgataagtcgcgtttctcggccgaatggcggcgtacgctggagaatacccccaacctctatctttggcaggacactgcggtcgaactgctcttcgggcagcagcctgcggaggagggtcggccgcaagtgcgcgggattcggacacagatgggggtggagttctcggccgactgcgtgatcctgactgccgggacgtttctggcggggatgatgtattgcggtcgttcgcacgccgagggcggccgtgcgggggattcggcttcgcacggagtgaccgaatcgctcgtggcgatgggtttcgaagccggccggatgaagaccgggacccctgcgcgactcgatgcgcggacgatcaatttcgaaattctggaaccgcaatacggggatgaaaatccctcgaaattctctttttctgccgatacgcatccggtgcagaatcagcttccgtgctttttggtctatacttcgaagaaggtgcatgacattctgcggaagggtttcggcgattcgccgcttttcaacggtacgatccgggggatcggtccccgttattgcccgagtatcgaggacaagctcaacacattcgctgataaggaccagcaccagctttttctcgagccggagggtcgttcgaccaacgaatattatctgaacgggttctcctcgtcgttgccctgggacattcagtgggaggcattgcacgccatcgaggggttcgaagatctgcatattttccgtccgggttatgcgatcgagtacgactatttcctgccgacgcaactgcaccattcgctcgaaaccaagctggtggacggactctatttcgccggccagatcaacgggacgaccggctatgaagaggccggggcgcagggggtgatggccggtatcaatgcgcatcgccgcaggatgggggaggaaccgctggtattggcacgcgacgaagcctacatcggggtattgatcgacgacctggtgaccaaaggggtggatgagccttatcgtatgttcacttcgcgtgccgagtatcggattctcttgcggcaggataatgccgacattcgattgactccgatcggatataaaatcgggctgatttcgcaaaaaaggtacgatagtttctgcaaaaaaaatcgactcgtagaatcgctcgtagcattcgctcgcggactgagtgtcaaaccggacgaaattaacgactgtttgaaatcgctcggttgcgacgcgatttcgcaaggtcggaaactgcacgacttgttgatgcgtaacaatgtgaccttcgatctgctctcgggtgttttaccgaagctcggcgattttctgcgcgagcaggagatggatgccgaggtcgtcgaggaagccgagatccaaatcaagtacaaggggtatatcgaacgggagaaattcattgccgacaaattgcatcgcctggagaatatccgtatcccggccgatttcgatttccattcgatgaatgccctgacgatcgaagcccggcagaaactcacccgaatccgacctgcgacgatagggcaggcttcccgtattcccggagtttctccggcggatgtgaatgtgttgctggtgaaattcggtcggtaaagtatcgggtaatgcagtttaaccgctatgttcccaaatttgacaatcgtttttggatgtatttgtcgtttatcaatgcggattaagatcggtcgataaattgtgcgattgtatttttctatcttttatatcgggagtagctgcggctattcccgatttttttacggctgtttgtaagtggtggcaaagaaaatatgcagtaagaaaaaaggatgttccacgtggaacatccttttttcttgagttttgcaggcgtcgattacatgacgatcgtgcaccagttgtgtttgtcttcggtgcggccgtactggatgtcctgcaaaagcgtatagagttgcagagaaaccttgcctacttcgtcgccgtaggtgtaggtttgcttcgtgtccatgtcgtaaatgctgccgatcggcgagatgacagctgccgtaccgcaagcgccgcactcctcgaaagtcgggagttcgtccaccggaatatgacgctcctcgaccttcagacccaggtcttgagccaattgacggaggctcttgttagtgatcgacggaagtacggagttcgacttcggcgtgatatacgtgttgttcttgatgccgaagaagttggctgcaccgcactcttcgatgtatttgtgttcggttgcgtcgaggtacatgatgctcgcatagccgagctcgtgtccgtgctcgcccgacataaggctggctgcatagttaccgcccaccttcacgtcgcctgttccacgtggagcagcacggtcctgttcgcggtcgattgcgaccttcatcggcttgatgccgcctttgaagtaagcgcctacgggcgagccgtaaaccaccagcaaagcatccttggagggttttacacccagtcctgccgtcgttccgaacataacgggacgcaggtagaacgatgcgccggtgccgtagggcgggatgaaacgctcgttgcgcttaaccacttctacgcaggctttgacgatcatatcgatcgtcggtacgggcaggcagaggcgttttgccgacgactgcaagcgttttgcattctcttcgacgcggaacagacgtactttgccgtcagcgccccggaaggctttcaagccctcgaaaagagccgtgccgtagtgaaggcaggatgccgacatgtgcatgttgatgtactcgtcgcttgtaatttccatttcgctccacttgccgtccgtgcaagtatagcgggcattgaaatcggtcttcatgtagttgaagccgagagagccccaatcgatgttctccattgttttttaatattaaaggttgtatcttttgttcaagaaatatctttattatccgactgtcgcacccggatttgtctgatcgtcaggttgtaacagccttaatttgcccgaagcgtcctgggccatcagaatcatgccacgggagaggatgcccttcagttcgcgcggttccagattcaccagtacgagtacctgtttcccgacgagttcttcgggtgtgtagtattcggcaatgcccgaaacgatttcgcgcttgtcgatgcccgtatcgacggtcagtttcaacagctttttcgtcttggcgactttttcagcggcgaggatcgtcgaaacacggatatccatcttttgaaaatcgtcgaaagtcgtcgtttccttttgatcttcaacgtgttgtgctgcttcggccgaagcattcgccgctttggtcgccgccaacttgtcgagctggcgttggattacgtcgtcctcgatcttttcgaagagaagcacggcttcgccgatccgatgtccggcagcgagcaggtcggtgctgcccagtttctcccagccgaagggtcctgcctgcaacatcccgacgatcttcttcgccgagaagggcatgaacggttcgatggcgatcgagaggtttgcggtgatctgcaaagcgatgttcaggatcgtcttgacccgttcgggatcggttttgatgagtttccacggttcggtgtcggccaggtatttattgcccagacgtgcgatgttcatcgcctccttcaaggcttcgcggaaccggtagttttcgatgttgttttcgagggcttccttcgcgccggagagttcccgaagcgtttcgcggtcgtagtccgtcagtgcgccgcaggcgggcactgcaccgtcgaagtatttgtgtgtcaggactaaagcccggtttacgaagttgcccagcacggctaccagctcgttgttgttacgggcttggaagtccttccaggtgaagtcgttgtccttggtttcgggggcgttcgcgcagagcacgtagcgcagcacgtcctccttgccggggaagtcggccaggtattcgtgcagccagacggcccagttgcgcgaggtcgagatcttttcgccctcgaggttcagaaattcgttggcagggacgttttcaggcaggatgtagccgccgtgcgccttgagcatggccgggaagacgatgcagtggaagacgatgttgtccttgccgatgaagtgcaccattttggtctcttcgtccttccagtatttctcccagtcgggcgtcaggtccttggtcgccgagatgtagccgatcggcgcgtcgaaccagacgtagagcaccttgccttcggccccttcgaccggtacgggaatgccccagtccaggtcacggctcaccgcacgcggttgcagaccgccgtcgagccagctcttgcattgcccatagacgttggttttccactctttgtgcccttcgaggatccattcgcgcaggaaaccctcgtattggtccaacggcagataccagtgcttggtggcgcgtttcacgggtacggaacccgatacggcgctgtgcgggttgatcagttcgtccggcgaaagggtcgatccgcatttttcgcattggtcgccgtaggcgcggtcgttgccgcagcgggggcaggtgcccacgatatagcggtcggcgaggaacgtctgggtttcctcgtcgtagtattgctccgaggtccgctcgatgaatttgccttcgtcgtagagcttgcggaagaactccgacgctgtcgcggcgtgggtcttcgacgaggtgcgcgagtagatgtcgaacgacatgccgagcccttcgaacgacgatttaatcaactggtgatagcgatcgacgatctgctggggcgtgacgccctctttgcgggccttgatggtgatgggcacgccgtgctcgtcgctgccgcagaccgagatcacgtcgtatcctttcaggcgcaggtagcgcgtgtagatgtccgacgggatatagacgcccgccaggtggccgatgtgtaccgggccgttggcgtagggcagtgccgaggtgacgagataacgcttgaagggtttactcatattgggtagaaaaggtctaacaattactattttgtgtcaaatgtagtgatttttctaataattagaaactaaaacccgactttgttgtatcggattttttcgtttcgggagcgggaaggagtggttcggacggaatgccgccgccggtgtcgtcgggcgggatccgtaaaaaaccggagcctgaaagctccggtttttacggatgttgccggccgtattattgcttgctccgcaggggtttgatgtccttgatgcggagctgtaccgaaaccgagccccggtagtggttctctacgatctgatagcagacgtcgatcggatgtcccgcgcggatccactcgtagtgggtcggctgctggaaggcgatcgtctgaatcgtcgtgttgggtttctggcgctgcatcaggtccatgcgcaggtgctcgcagtcggcgccgacgagcttcgtttcgccgtggctgaccacgccccgcgtgacgaataccggtgcggggttgccggggccgaacggctggaaacggttcaggtcgcggcggaacgccggggtgatgttcgagaagaagagttcgctgtcgatctccacctggggttgcagcgttatcgggtcgatgttctcttcgacgtaggcattgaagcggcgggtgaactcctcgacccgttcgggacgcatcgtgagtcctgctgcgtacatgtgcccgccgaagttctccagcaggtccgaacaggattcgattgcctgatagaggtcgaagccgggcaccgagcgggccgaacccgtgacgaacccgttgctcatcgtgagcaccaccgtcgggcggtagtaggtttcgatcaggcgggaggccacgatgcccacgatgcccttcatccagcgggggttgtagatcaccgtactcttggcggccttcagctccgcgtgggcctcgatgaagtcgtgggcttcctgcgtgacgctgcggtcgatgcacttgcggtcctggttgaagccgtcgatcaccgagccgaactcttcggccaggctttcgttgccttcgatcagcagattgaccgccgcatagccgcccgaaggagcggcgttttcgtcgttttcgtccatccgcatacggcctgcggcgttgatgcggggtccgattttgaagacgatgtcgtcgatggtgatgttgtgtcgatccaggccgcagatcttgatgatcgagagcagccccttcgagggggaggcgttgagccgcagaagcccgtagtgggctaaaatccggttttcatccaccagaggaacgatgtccgaggcgatgctgacggccagcaggtcgagcaacggctcgatttgctggaacggaattccgtttttctggcagtaggcctgcactagcttgaatcccacgccgcaccccgacagttcgtcgaacggataggaacagtcggcgcgtttggggtcgagaacggctacggcgcggggaatttcctcggccgggaggtgatggtcgcagatgatgaaatccacgcccttgcgtttggcatagtccactttctctatggctttgatgccacagtccagggcgatgatcagcgtcgcacccttgcgtgcggcgtggtcgatgcccttggtcgagataccgtaaccttcggtataacgatccgggatgtagaacaacaggtccttgtgacctatctggcgcagaaatttataaaccagcgcgacggcggtcgtgccatcgacgtcgtagtcgccgtacaccatgatcttctcacggttgcggacggcccgctccacccgttcgaccgccttgtccatatccttcatcaggaacgggtcgtgcaggtccgaaagctgggggttgaaaaatttcttagccttctctaacgtgtctatgcctctctgtacgagtagattggccaggaccggggagatgcccgtcgcggcagccatcgcggcaaccgcctccggattcccctgaggcttcactacccatcgtttttctatgggcatatttgttattatttatatattttaacattcaaattctcgcataaatcttcgacgaggcgtcgtttgacctcctccatcggaaccgggcgaccgatctccttttcgatcgacgtggcaccccggtccgtaaacccgcaggggttgatatgggtgaaataacgcaaatcggttgccacattgagtgcgaagccgtgcatggtcacgtaacgcgacgcccgcacaccgatcgcgcagatcttacgcgccggctgcgctccttcgatccagacgcccgaggcgccggcgatgcgtccggcccggatgccgtaacgggctaccgtccggatgactgcgccctcgagcgcgtcgatgtagtcgcgcagcgaaagtccgatgcgctccaggtcgaggatcgggtagcccacgatctgtcccggcccgtggaaggtgatgtcgccgccccggtcgatgtggtaaaattcggcgccgatgctgcgcagatactcttcgccgaccagcaggttctccgcatggccgctcttgccgagggtatagaccgccggatgctccaccaggagcaaatagcccgcgccctccgccggggttcccttggcccgcaggagggtgtcgaaaagcctctgctggtactcccagcaggctttgtagtccatttgtccgaggtcccggtattcgacaaacatcgtaaattacgttacgacacctctccgtccggctccgtacggataccgtaaatccggaaagcgtcggttcaacactttctttgtcgcagaccttttcccgcgcggcgggaagactcaggctttcgcggaaacctgtcgcttcagacgcaccgagccgagcgcttcgtccgccaggtacgacgaacgcaccatcggaccgctcgcgcagtagctgaagcccatgtcgagcgcctgctgccggtaccagtcgaatttttcgggagtaatgtacgccgcaacggggtgatgctccagagtgggacgaaggtactggccgagggtcacgatctccacgccggcggcgtgcaggtcgcgcaaggtctgtaaaacttcttcatcgctctcaccgagtccgaccatcaggccgctcttggcgacggcgcccttttcgcttaaatagcgcagcacgtcgaggctcgtacggtaacgggcccgcgaacgcaccaggggggtcagctgttcggtggtttcgatgttgtgcccgatgatatcgggcccggaggcgatcaccgtgtccagcaggtcgggtttcgcatccagatcgggaataaggagctcaattgtgacgtcgggattttccgcccggatcgcgcggacgcattcggcccagtgggccgcgccgccgtcgggcaggtcatcgcgtgtaacggaggttaccaccacatgccgcaatcccatcaaacggacgctttcggcgagtttggcgggttctgaaggatcgggcggcagaggccggcccgaaagggtggcgcagaatcgacagttgcgcgtacagatttcacccagtatcatgaaggtcgctgtcctgcggctccagcattcggctttgttcgggcatagaccgctgctgcagatcgtgtgcagggagtggtccctgacgatgcgttgcacgtccgcgtattctgcggtgcggtgaagccggattttcagccattccggttttttcaggacgtttaccttctcttcatgcaatttcggcattttaagttcattattttcccaattgatgcaaaaatacaaaaaatatcaatcgcttctcctttctgttgcgaaaaagatgaaaaaagcctttgcaggcgcaggggaggcggtcggtccggtgcgaaggaccagccggggccggatgtcggaacgggagggaggagtatgcggagagcgcatccggaacggctccggatgcgctctccgcaatatgttctgtcggcgggaaggttatctctgtccgaggtgcagctgccattgccaggccgtgcggagcgtttcttcgagcggccgctcggcacgccagcccaggagggtgttcgccagcgtgggatcggcccagatcgccgtgatgtctccggcgcggcgcggcgcaaagcggtagttgagtttcagtccgttggcccgttcgaatccgcggaccagctccagcaccgaaacgccccgtccggtgccgacgttgaagacctcgtaaggggtggcgccgcgctcttcgatcaggcggtgcagggcagctacgtgggcgcgggccagatcgacgatgtcgatgtagtcgcggatgcaggtgccgtcgggcgtcggatagtcgttgccgaagatgctcaggcattcgcggatcccggcggcggtctgcgtcacataggggaccaggttctgggggacgcctctcggaagctcgccgatcagggccgagggatgcgagccgatcgggttgaagtagcgcagggcgatgccccgcagaccgggatgggcggcgacggcgtcgcgcaggatgtcttcggagatctgtttggtgttgccgtaaggcgacgtggcgggcttgcggggcgtctgttcggtgacgggctgggcgtcgggttcgccatatacggtgcaggaggaggaaaagaggatgttgggccgtccgaaatcgcacatcagctccacgacgttcaggaacgaaagcaggttgttgcggtagtatttgagcggttcggcgaccgactccccgaccgctttcgacgcggcgaagtggatgaccgaacggaattcgtggcgttcgaacagccgtcgcatcgcctgcaggtcgcagcagtcgatctgctcgaagggcacttcggcgctcgtgatgcggcggacgccctccacggcctgaaggtcggagttcgagaggttgtcggcgatcaccacatcgaatccggcctggatcagctcgacggccgtgtgcgatccgatgtatccggcgccgcccgttaccagtactgtttctttcataaggctatgtcgtttgaatttctgaatttttagcattgttcttcctgccttccctgttgccggatggttttccgctgtcggctactgccgtttcgcggcattcgggtcgtttgttccggcttctcgccccttcccggtggtagaggccttgagttgcgattccgaaaaatcgggacggtacgatttcataatcgggcctgtctttcgtctgcggggccttttacagttcctgcatggccaggcagtcggaacggtcgtcgggtgaatccccgtttatttggcggcgtacaccacctttttggtttcgaagaacgcttcgtcgaagaatgcggggatcgggtactccgtccacttcataccggtacggctcaactcgtccgcgaggtcgccgcccttgaggtagaggatgccgttgggcagggcgcccttttgcccccggtcgatcttatcccagacccagccgacgaaggtcggcatctccgtcacggcgcgggaaaccacatagtcgtaccgttcgggaagcgtttcggcccgggcgcagaggggggtgaggttggcgaggccgagtccctccgcaacgccctgtacgaccttgattttcttgccgatcgagtccacggccgtgaaatgcgcctcggggaagaggatcgccagcggaacggacgggaagccgccgccgcaccccacgtcgagcacccgcgctcccggggcgaaggggcagaccttggcgatggagagcgagtgcagcacgtgccgcaggtaaagttggtcgaaatccttgcgcgagatcacgttgatcttggtgttccagtcggcgtacagtgcgtacagcgcttcgaattgcccgcgctgcgggcgggtcaggtcggggaagtatttgtcgatcagggcaatcataaggtttgtgggcgttgaagttttttttaggcaggtcggagtggttcgttctgcggcgttcgccggtcggaaacgtcaggatttttcatctgcggcgatcaggcggcacatctgctcccgggcgcggtggatctgggtcttgacggtgcccagcgggagttcgagcttcatggcgatctcttcgtaggagtactcttcgaagaaacgcatgacgatcagttgtcggtagcgcggcggcatggcctggaggtagcgttcgatctgcgtgcgctgctgtttgcggatgatgttctcttcgggcgtggggttgttggagggcggtgccgtgaatttgtcgtcgatgggcaggtcctcctggcgccgccggatgaaatcgacgaaggtgttccgggcgatggtgtaaacccactgtccgaaggtgtaggccgggttgtagcggtggatgttgatatagactttgatgaaggtttcctgcagcaggtcgtcggcgtccagggggttgttggtgcgctgtatgaaaagccggtgtatagcctccttgtaacgctcgaaaaggtattcgaaggcgatgttgtcgccctgcaataccagctccacgagcacccggtcgtcggctatgatatagtcggctatctccatacccgctcgtctttgcgcagcagcaacagccccagcagcagggcgaaaaacggactcagcaggtcgtacaggaagtaacgtccgcagattttctcttcacccaggcggcggctgatgcgccgcgcctcgacgagtacgatcgcaaaacgcgcgagcagcagcacccctgcggcgatcttgaattcccagggcatcaccgccagggcgacgatcgccgccagccagaagagaatgcggctgcccagttcccactggatgaagttcttgacccacaagggataaaaaggaatggctcccccgaagaaacgctgggtgccgatccaccacttgagccctccccagctcttttcacgcagggtggcgcggggagagaggaccacgctgacattgccgggggcgatgatccgcgacatgaacaaatcgtcttcgccgatattcatattgaggtggctgaagccgttggcgccgaaatagagccgcttggtgaatccgtagttctggcgcatgccccggtagggtctgccgcatacggcgcttgagatccagtccaccgagtgcatcatccgccaggtgcggatcaggtagctcgcaaaccctttcccgcgctccatgccgcagtagccgagcacgatttcgccgcgccggaagccgttcgccatgagcgagagccagcggtccgaggaggggtacacgtccggtgtggtgaagagaaggtgctcgtaatgggccgatttgatcccgacgttgagcgccattttgggcgagatcgggaagcggggattcagttcgatcttggtggccgtaatctgtgggaacgactgtttgatgcggaccaggtcgtcgtagaagtcggtgtcccggcctacatagacgatcaccacttcgaagtcggggtactcctgggcgacgatgagcggcaggatctcctccacgaaggcgtaatcttccgagaagaggggaatcaccaccgataccggaggggtttcggagaggatctccggacgccgggtgtccttgtatttgggtatgcgcccgtaaacgaacaggtagtaatatagctggattccgaacatgaccagaaggacgcccgcgagggccgtgccttcccagccgtagtggacgataatgcgattgaaaaattccatggcgtatgcgttgtggcggacccgggacggtggaagctggaagcggagccggactcgttcggactgcgccggagtgcggcttgcggacacgcgggcggatcccacgcaaagataaggattttatccgaatcggtattctgccgaaggaataattcgtggagatcgaccgaagagaaacccgccgtcccggcggtacgggcgaggcgggtttgcggagagtcggaggagtcttcgacttggctatggagttgccgtaagaagcggttctcgggcggtggattcggtttccggggtggtttgcagatcttcgacaccgcgatgtcgtgcccggtaggtcgcgggtgtcatgccgtattgtttgcggaagagtttgatgaagtgcgaggtgttgggaaaggcgcatgcggtgccgatttcggcgatcgccttgtcggtcgagatcaggagcagccgggcatggatcagacgttgccggatgagccattggtggggcgaggttccgtagatgcggaaaaattcctttttgaaggaagtcagggagcggttgcagcgttttgcgatctcttcgaccgaaatatcggaaaagatactggcatagacggtttgctggaggttgtcccgggccgcatcgacgttgcctaaaagtttgctcttgatgcagcagtcgccgtgcgaaacgatcaggtagatcaactcggtgattttgatattttcggcaggaggatcgtgcaggaaggagtcttccgtaagataatcgttggtgtggttgaaaaagcgccggatcgaactccagcccggcatcgtggcgtggttcagggtacggcagtcgtcgcactggtggttgttggtgatattcagcttgtaggcgatgttgaggtgcagcaggatgcgttgcagctcttccgaggtatagcgaacgaggatctgttcgtagggatgtccctgcgcggggatgtttttggtatagtggcaacccataccgaggaagaaaagatctccctgggagaacttgtagcatttatcgtcgtaatagacgtatttttctccgttgaggatatatccgatcacgcagcgggtgaacttatgggtttcgatgccgttgttggaggccgatacatacttttcgatcgacggattaacggtttgggtgtcgtaggattcgttcataatcggaagattttatggctcgatgaaggccggtgtccatagccttttatcgaagattatgaatcaaatatacaatctaaggttgtatatttcaaattaaaataggaaaaaattagatcgaaaatgttaaaatatatactatttcaacattttacgcgttttttattgcaatatatttacaatgcaagtgatgtacaaaatgagatacagcagagttccgacggtacgttggatgcggatgaaggtcaggggcatgagcagtgctgcgggtacggctgcgacggccagcagtcccggcgtgacgctcggtaccgctatcaggcagcccgtcaccgtaaagagcaggatggtgtaggtcagcatgccccgggctttgatgcttaccgtgcggaaactgatgagtccgaagaagatggcgcagagtacgatgaaaaggacgattccgagaagtgcggggacgagcggaggcgtattggcgaaaatccggtatccgctgtcgctgacgaaggagtgccataatccggcgggggtatccaggggattggctccctgcccccaggcgatgtagcagacggccaggaaagggagtacgacgctgcacagcgatacgaagacttcgcgcaaggtccgtcggaagcagaatgctgcggccaggaccaacagcggcaggggaagcagcggggcatagagcagcggcagcagccccaggaaaaacgaagcccggaacacggctccgatcgcgtagccgttgcggaagcaggcgaagaagttctgggtcgataacagcaggacgaacgctgcgacggattccgtcagatactcccgacccagaaggattccgcaggcgaccagtccgtacagggggatggtcagcgtactgctgacggggtagagtccgtagcggaccgccagcctcccgcagagaatgcccgtcagtaggagcaggccgccgcaaaggatgcgggagcagcgggggaatcgttcctggaacaagccgatcaggtcacccagcggggtggaaatcatcgtttccggagccggtgaaatagttgtcccggtcgtcatggcggctgcgatgacgaccagtatggacgcgatggccagcagtaagggttggcggataatgtccggtttcatggttcgacgatggttttgtccgaatgcgggctgcggtttctgttcccggcaaggtgccgaaaattcagcattgcgttcgcttgtcggaaacggccgctacaaaggcaattatatctttcgatgcacactcttatccgacgattgcagcgccgaatccgaggggcgcttattcgtggtccgaagccgcgcctgtaaggctgccctcccctaaatttcctcctcggagggaactcggggcgcaacactcccccaaaggtacattggagtatataatcccggctacaaaattaggaaaaaagcggacgaaaccgtaattattttggaaccatatacgattttattccggatctgtttctggtcccgggactttgcctcgaacggccgttgtctgccgccttgggcggtagttacggttccgtactgaagcctgcctcctgcttttcggaggaatttcggggaggctccggcaaatccggggtgatcgaaacgtcggtgtaaaattggatatgattgccgatatttttaattttgcgaaaatgcgtgcggtatttcggggaggtccgaagcgtttcggcgcacaccccgggttcccttgtttttgcggagatcggcgctggcttgtcggttttcgaagggggcatcgaaatcgtgcgataataactttgtttcggatgttggagaattgctaccagaaagagctgcccgaagccgggtgcgacgaggcggggcgcgggtgcctcgcggggcctgtttttgccgctgcggtgatgctgcctccggacttcagccacccgttgctgaacgattcgaagcagatgaccgcgcgtcagcgcgatttgctgcgtgcgatcgtcgagcgcgaggcccttgcctgggtcgtaaaggccgtttctgccgagcggatcgatcagatcaacatcctgaacgcttcgttcgaaggaatgtcgctggcggtcgcggaattgccgatccgtccgggatttctggcgatcgacggcaaccggttccgcacgacgctcgacattccgtatcgctgcatcgtcaagggagacggcaaatatgcggatattgccgccgcgtcggtgctggccaagacccaccgcgacgaatatatggagcgcctcgccggggattttcccgaatacggttgggagcgcaacaaaggttatccgacccgcgaacatcgcctggcgatccgccgttacgggcttacgccccaccaccggctgacgttcaatgccgggatcgaccagttggagctgttctgacgccgcttgtgaggaattctgccatacctcccctccggggctgaaataaaggcaatcatatctttcgatgtacattcttatccgacgattgcagcgccgaatccgggggcgcttgttcgcggacctgcgccgcatctgtaattcggctcctcctttaggaaggaactcggggcgctgcgctcctaaagaggtctgatgaagcagtaaacgcaaaaataaaaaacgcccgacgatcgggcgtttttctatcggatgcaggccgtcgccagcggacggccgtcgttattttaccggtatttgttgctgatcagcgtcatgaactcctggcgcgtaggcgggtgcgagaggaatactccggtgaatgccgaggtagtcgtggccgaaccctgcttttcgacgccccgcatctgcatacacatatggctggcttcgatcacgacggcgacgcccatcgggttgagggcttcctggatgcagtcgcggatctgcaccgtcaggcgttcctgcacctgcaggcggcgggcgaagctctccaccatgcgggcgattttcgaaaggcccgtgatgtatccgttggggatgtacgccacgtgcgctttgccgtagaagggcagcatgtggtgctcgcagagcgagtataattcgatgtccttcaccagtaccatctgccggtactcctccttgaaggtcgccgagcggatgatcgccaacggatcgtcctcgtaaccctgcgtgaggaacgacatggccttggccacccgttcgggggttttgagcagaccctcgcgtgccgggtcttcgcccagcagttcgagaatcgccttatagtgttcgcggagttttgcgatcttctcgggcgagaagttctcctccttttggtatcgtttcatttccataagcggggcaaaggtagcttatttcccccggttatgcaaaaattccgctaatttacgcacggcgcggccccggtgcgagagagcgtttttctctgccgggtccatttctgcgtaggtcttggcactcccttcgggaatgaagagcgggtcgtagccgaagccttcggagcccgaagcgcactgggcgatgtgcccctcgacgatcccttcgaagaggtgctcctcgccgtcgaggatcagcgagatgaccgtgcggaagcgggcccggcggttgccgacgccctccaggttgcggagcaggagttcgttgttggcggcgaagtcgtgcccgtcggtggcgtagcgggccgagtgcacacccggtgcaccgcctaatgcttcgacttcgagtcccgtgtcgtcggcgaagcagtcgcagcccgtgcggtcatgaacgtagcgggctttctgcgaagcgtttcccgcgatggtgtcctgttgttcgggaatctcctcggtgatgccgaccgaacggggtgtgacgagttcgaaatccgggccgagaacggcttgcacttcactcaatttgtgggcgttattggttgcaaagatgattttcatagacgtatcgtattgttcggtttcgtcgaatttccggatcatttcggattgcttgcgtgtgctgtgtgtttttgcggaacccgggtgatggctttccgtcgaatcgcaacggattcctttgtgctacgtgcggggagtttcgagcagctccagccggtgatccgcctcgatcttgtcgatgatcgtcttgacgagcgtatccatttcggaaccttcggagtagtcggccgggcagacgtggcttacgcgattgtcgcggatcaggccgttcagttcgcgccgggcgtttcggatctcggggttatagacggcgatcgaatgtccgccggagttcttcaccagccgcatgcaggggatgtcggtcgtaccgtcgcccacgtagatcatgcgccggaagggtaccgggcgcttgtcctcctcgatgtactggttcacgagcttgctgtcgaagaccgattcgacgcccttgttgatcttgaagatgaactgggtcttgttggtgtaattgaccgctacggcgggccaataggcgactccgtcgatgtcgtacaggaacgagcaggcgtagatccgccggaattcatgggcgatttccgtcccttcgatgatctccttcagacccgaggagttgatgtagtgcagtatccggatgccccgcgccgcgccgtaggcgttgatgcgtgcgaaccactcccggactcctttgtagagggtcacgcggcggcccgactcctggaacgcttcgcgtcgcagggacaggcctttcgaccgcgcctcctggatcatgcgggccatgtaggtcagcaccatgtcggcgtcctgctcctcggccagttggttggcgtcgtgccagaactccttgttgctcttgccgacggcggggatgaagtcgtactcctgcatgttgccgggggcgagcgtgccgtcgaaatcgtagatcagggcgatggtcagcggttctttcataattgcgattgcggttgaatgtgtcgttgtcggttccggttcggcggagagggcgaatccgccccgtcttcgttgccgggcaccgtcgggctgttttttcgttttttccgacgctccggggcagccgtttcgcttccgtttgtcggaaacacgggattttccggtcgttttccgtgtccggcgtggcttcgaaatccggaaacccgcctgccggtcgaaaagtcggttgaaaatccaaagttaagaaaaaatccctatttttgttttcgtaaggaattaaatcgtaccgaatatggaatttaaggaaatactccggcgccggcgcagcgtccgcaaatatctttcccgcccggtggagcgggaggtgctcgataccgttcttcgggaggctctcgcggccccgtcgtcgcgcaattcgcattcgacgcacctgcgcgtggtcaccgatcccgaaacgatcgcccgcatcgcccggatgcgggattacggttcggcatttctggagcatgcccctgcggtcgtactggtcgagggcgatcgtacggcgaccgacctttggcgtgagaacgcggcgatcacggcgacggccctgttgttcgcggccaccgatgcggggctggcctcctgttgggtgcatgtgaacggacgtccctgcctgaaggatcagcccgacggagcgcaggcggaagattatctgcgggagttccttcccgtcccggcggagcacggcatcctgtgcgccgtcgccctgggttactccgacttcgagcctgcggccctgcccccgttcgatgcgggaacgcatatccactggccggaaaagtagcggggtcgaatcgagtccggggcgggcgagtgtcgggaaggacctcgttcggtcgttttatgtcgcttgccggtgcttgtatcgggaacccggcgggattcgactttcttgggctgaatttatctttttcgcggcgaaaatccggttcgtcgaataaaaaaaccgcaacggaggggttgcggtttttctgtttcggtacgccttgtcatttcttgttgaagagattcatcgtccgttcggggccgatcgcggcgaacgagagaatcgcgtcgccgaagtatttgagtcgttcgggcatcgccttgcgctcttcgtcgttccagtgccccagtacgtagtccacctggtgtccgcgcgggaagtcgccgccgatgccgaagcggatgcggctgtactcctccgtgccgagcagttcggtgatgttcttcagtccgttatgcccgccggcgctccccttcgtgcgcatccggaaggttccgaacggcagggcgatgtcatcgacgacgaccagcagattctcacgaggaatcttctccgcgtcgagccagtagcggacggccttgcccgaaaggttcatgtaggtcgagggcttgagcagcaccagcgtatgccctttgctgcgaagcgtggccacggcgccgtagcggtcggtggtaaaagaggtgttggatgcttcggctaaagcatccaacacgtcgaatccaatgttgtgccgggtatcggcatattcggcgccgatgtttcccagaccaacgatcaggtatttcataagggtaatccgttgagattacttcgcagccgcagcgtcggcaccgcgcgaagcacgggttacgcgcacggcgcatacggccgtcgttgccggggtgaggaatttcactccgtcgaagttcaggtcgcccacgaagatcgtcttgcctacgcccagcggagttacgtcgataaccagttcgtcgggcagcttgtcgagctgtgcgctcacggtcagcttgcgggccgagagaacgagcttaccgccgatcttcacgccttccgcattaccggtcagacgtacggggatcgaaatggctacgggtttgcccggctgtacgcgataaaagtccatgtggagaatctcctcgcggatggggtggaactgcacgtcgcggagtacggctttttcggttttgccgtcgatctccagatctacgatgtaggagttgggcgtgtagatcaggggtttgatctcccggggatccaccgagaacgaaaccgtttcgccgccgccgtagagaacggccggaatctgaccttcgcggcgtaccgcctttgctgctttcttgccgtagttttcacgcttgacggcctttacttggattgttttcattgtaatttgttttttgtatgtgttaccttgggcgctactcagtccgcctctcgacgggcggaccccctaaacgcttgcggggccaaagataagcatttattcccggaaaacaaaaaacggcaccctgctttgcggggattccggattctgcgggcgtcgccgtccgtggcggcggagaacggcgggccgctgccggagtcgggttcgctatggcttcaggacgaggccgcccgcgatcagcacccggtgcaggacgttcttttcgggagcgtattccgggtaatcggacgggtgtgcgtcgaggtgatccgagagggcgtgcaacagcgccgagagccggttccgcaaggcccggtgcgatgcggcgagctgctgttgtccggccggctggcaggcggaggatttggtgacggtcgtgccgcccgctccgccgtgcagatcgagcgcgggttgcatggcgacgcgcacggcgcaggcggcagccggcgctgcgaactcttcgcgcagggtcgggtactctccttcggcgagtttctgccagagtgccgggccggtcacggggaggagatagcgggcttccgccgccgcgatatcgacggtgccgatcgcttcgggcggcaggtagccgccgtcggcgaaagcgaggtcgatgacctcgcgcggggttacgagggtggtcatggtcagtcgatgcttcggaggttgtacttggtgatttcggccaggaaatgttgctggcgttcgtcttcggggtcgtagtccaggccgtcggctttgcgggcctcccagactttcatataaaggggtttggagcgggtcggcggacgattgacgatttcgagcgacgaggggtcggcgccgaggatgcgtccgatgatttcgcggatcggctccagcagctcggcctgttcgcccaggatgaccgtgttgagggcgatttcgtattcgtgcaggatgcgttcggcgctgaagcccgaggcgtagtccagtccgctcagggtccggaaccacgaatgggcgaccacgatgtccgaagtggcctgttcgtgcagcgaccgccagtcgccttcgttctgcgaggcgatggggatgaagcgcgagtggtcctctgcggccccttcgcgcagtacgaacatcacctgcccggggttgccggcgaatttctcctcggccgtgcgcatgatccgttcggcctgcgcctcgtcgtccatcgtgctgtcgagcatcatcacgcccgagagttggaacgagttgtcgagccgcgagatattccagcggtcggtcttgtaggcgatggccgacacaccgaacccggcgatgtagggcggtacgccgtagtgctcgaacatcggttcgtagtccttgtagtggacgatcgcgcggagcgtgccgtcgtcctgccgttcgaaaagcgggtagaggggcagcgtgcgggcgtccgcagccgagaaacgggaccagtcgtggtggagcaggatgtgccgtgagtctttggctacgcggcagcgcgaggcgtcctgatggtagagggccaggaacgagtgcttttcgtcggtgacgacttccaggaaggcgttgccgaagagcgacttgtcgaaggacagcttgctgcatacctgccgcagggattcgcccgatccattgacttgcgcgacgaaggcgcccagcagggggacttccggatcgaacgtgaagcctttgccggagatgtagtcggccttgtcgttgatgatgcggcggtgcgtggtcgagcggcgcgacataagggccagggctgcggggaagagattgtcgtcgccccagcgccagaatttgtcgctttcgacccgtgcggcgccgagcgtgaggtaggggtcgtcgcggcggacggccttcaccagcgccgttttcttgagtttctgtttcgtgttcatgggtattggtttgaaaaacagaggctgccggacgggttgccggacagcctctgtcggttattgttcccggatgggcggtgccggggccgtatcctcgccggccagcgtcaggacgaggacgggacgtgcggcgaatttcgtttgggattcgtaccggatctccgtgagccgcaggggttgctcggctccgaatttttccgaccttcccgccagcaggaagacgcccgatgcggtttcgatgcgggcgaccgtgccttcggtcgcgagccgtgcgagctgtcgttcgccgaggcggtcccggatttcttcgggatcggcgaccagcgtgagcgtatggcggaagcgcggaggtccgtccggattcaggttctcttcccggaacgacgaggactgttccaggatcagccattgatcggccgatgcccccgctcgcagcgtcagccctgtgcagcagccgtcgccgtaggtggccgatacgatgtcggaggccgggatcagccagacggcttcgatgcctcccgcaggctttaggggccgggcgtagggagtggttccggacatggtcagatgcgcgatgcgaatgcgaccagtccttcgtcgagcacgtcgcagccggccatgaagacggcgcgctggcggttctccatttcgtcggggttgtaccacatgcggatttcgttgccggggaagtcggccgtattgacggccagcaccaggttgcggcggtcggtcaggatgcagaacgacttgggtacgggcgacgaagaactcagtttggccaggtaggacgagatgcgcagatccacgacgggaatgccgtgatacagcaggttttgacggccgttgatatagtcggtgtaggcaccgtccgtgctcatgctgtcgaggtgcttctcgtaggcgctgtaaacgtccgacgaaacgaagaaggccagttgcccctcggctttaaggtctttcaggcgttcgtccgcatttttccagagatcgtcgaacatggcgaccgagttggccggtgtgttcatggcgtccgtttcgtaattgtaggtatagaccttgttgttgttcgagtaggtggcgatggttttgagaaagccgtcgaaggtgttcgcgccgctttcggccgacgtgtcgcccacccacatcgtcgagcggatgctttcggcgatggcctgtttgaagagcgtggtttcggcctcttcgagttcggtgcccgtgagatcctccatattgacctcgggacggttggtaatcagctcatagaccagcgagaagtagtctgcggccgagtagcccagttcggctttcacgcggttgagagggatggttttctggagttttttcgagccggcgccgccgctccagcctgctgcggtgaatttttgcaggatgtcggttttgggctcccacatctgcaccgtcgtcggtacgggcatgttgtaaaggacgcggacgcccaggtcgatggccgaaggaccgctcagcatcgggcggaaaaagatcgtttcgaggtttttgccggtgtaggttttggcattttcgagtgcgctcataagataatttgatttttggtgattgaatgggttgttcgaacgaatggaatcggttcgggtgtagcagttttgcggagggtgtccgaaggcggggcgccggatcctcagcgggcgggttttaccggatcagttgctttgcatcttcggcataggcccgctggttggccgagggagtcgtttctccgatcgacggatcttcgcgggggagcgtgcgggtcggagccgcgaattgctggccttcgtgcagggcgagttccgaagtgcgggggccggaccctttttccgggtcgccgaaatggaggatgttgcggtcggggggaagggcgtctgccggacggacgagtcccagcttgccgagcagcttgcgccattgtccggccggcgtcgcctgtgccgcaggcgttttttccgtagcggcgggttcgatgatccgatcgacgagtccggcggcgagtgcctcctgcggagagagccagcggccggagccgttgttttcggccatcaggagggtgaactcctccggagtgcggccagaacgggcggcatagacctccgccaggcgtgcgtcggttttgcggagcaggtcgatgcgggtcgcaagctcttcggcattgccttcggcggtgcagatcgaattgtggatcaggtagagggcgtgggccgatatttcgcggcatccctccgatgcggcctgtgcgatgactgtggccgccgaagccgtatagccgtagcagcgggtgacgatgtgtccgtcgagcgacgagagggcctcgtagatcagcagggcgtcgtttacgtcgccgcccgtcgagcggatattgacgacgatttccggggcgtcgatttcgcgcagccggtcgaggctgtcccggaatttttcgtaggtggctacgcgcgacgagggttggtcgaactgccactcctcggggacgccgatcaccccttcgatgtccacgaagcaggtgtcgttgcggttggtgatttgaatgtcggattgcatggaaagttgttttttgccggctcgctcgccggcgttcggaatggggttggctgtgggcgggatcgttgcggtttcgcggcgtccccgctccggcaggagggttgggcggattttcgaggagtgcatcccgtgagagtgcggggagtcgtacggctgcggtccgcgcggatgaaggacggtcgaagggctatccgttgggcagacgggtgaaggtgcagcgggtcgaggcggccgaggggtcgtaaccctcgatgcggcggagcgtgcagcggatctcttcgccgccgatgcggaacaggaacgtcgaggcgatgcagggggcgaggcgctgtatctgaaagagccgttcgatgtcgcacggttcgagccgcaggtggagcgtgaggtgctggcagagtttctcctgttcggcctgggtgtcgtagaagcggtgcagtccctgttgtccgtcccggtcttcgaagcagagcgtgaacccgttgtcgggatcgttacggtggaatgcggccagggggtagctgtctccggtggaaggatagccccagcgctcgccggcgggcaggggctgcatgccgcagtagcggacgatgcggggcgtgaaactgttccggtcggtggtgtccggggcgtcgcggtcgccgacccgcaggacgagggccgaaggtgcatccgcataacattccgtttcgctgaccgtcggcgagaagaaggggttggcgaggtttctttcccggtcgatcgccgccgccgagtcattgaccagacgccactggccgaagggctcttccagggtcgcgttcagccgggtcaccgcaccgtccgcctcccggtacttgtagatgcggacacgttccgcatcctgtgccgcatcgcccagcaggatcggctgcgagcggtcgatccgggagctccagtcgaaggtctggccgaggcggtagaagtcgtcggccggttcgacgtaaaccgtgcgggtttcctcgtcggtgtaaaagcgcagattgaacaggtgccgcagggcgtcgagtacgacccatttgcggacgcggtgccgggcgacgtcctcgaaagagatcggggtgttcagaccgggtgcgccggtgaagtcggggcgcagggtgcattggcggctcagggagaatttcatccccggttccgcaccgtagaaatagatggtcgagaaggttttgggcgaggtcggcgtgacagttaccgggttggtacggacggtcatttccacttcggtctgtccggtttctccgatgtagccgtcgtagagtgcccaatctccggtgtaggtcgtgtaggtcgtgcttccggcggctttgcagagcagtaccggggccgtgacggtcgagccggaaggggtcgtgaccagagccgaccgcgaatcgaactctccgattgcgtgcccggccgtgccgttgacggtgcaggtgaggcggtaggagtttccttcggtgtggttgaacacgatggcacggtactggaaggcgggtttggtcgagtttctgcggtcggcgtagcggtttgcgagggcgccctgtacctcggtgccgtcgcccaggtagaaggagtcgattcctttgaggcggttgcggtcgaggatgcggtggtcggtgatgtagcggatgtggtattcgaaggctaccgtcaccgaggtcatgggcctgaagacgatctccccgtcttcgacggtgaagcagtggttgttcgaaaagacatcggtgagggtttctcccagatcgttttggtcgttcggattgaccgtttcgacgaaattgcctaccgagttgatcgacttgtaggggttggcgtacacacggccgtcgctgttcgccgtcgtcgccgccgtcgtcgtacgccgggccaggaaatccatgtggttccgcagggcgttcgtgtcgcgcgaggaataggcgccgctcaggtagagcgagcggaaaaattcgccgttcagaaaatcgctttcaagggtgtagcccgcttcggaaaagagtgtctgcacgacggttgcagccgaaatgaacgggtggtagtcgtccacggagaggaatcgttctacgggaatcagttcgaccgacgacagttcgggggtgtattcgtcgcggcataccgggaagaatttgaccggggtgttgttggtccaggtctggcggatcatcgtgggcgtgagccgtcccgagaaggagatgccgagggtgttgaacatctccgcagcggcttgccgggcccattcggaggtgccgctgcggatctctatcagatacccctccgggtcggagtcgtacgctgccgagagcagccggacggagccttgcagcagtttggcctctccgtcgctcaaaacggccgtgtgctgcgcggcattgaagcgctggcccgtgtaaggctcggcggcgaatccgaaaatgcggtcgttggtccgggttgccggcagccgcagtcggagggcgtgccctttgtttccgcttcgcacgtcggcgagatcctgggcatcgtagtcgagggcgatgcgctgcgacgggtcgaggtcgcagggaatttggtcgatagtgagtttcataggcagcgggtttcttgtcggggacgcaggctgatttcgatacagcccagggagccgtgccggccgatcgtctgctcccgggtcaggatgtccacctcttcgtatttgtcgccgtcgatcttccagacttggggcgatgcggcgatttcggccagcgcttcgataacggcggcgggttcgaaggccgaggcgagggtcgtcgtccgttcgtcgcggatactgatatcttcgtagcccgcgtcgtcggtgagtacctgttccttgcggattttctggacgacgcttttcaccaccggaaaagtgtagtgttcgatcgaacctgcacggcttcgccaggcgatacggcatccttcgtcgcatttcggaacgaccgtgtagccgatttccgctacggtctgcccggcggtggcgatccggacggtgatcgtgccgaccgagggcagaaaacttcgggtgttgagccggaagagggtcagctcctcccctccgatcgcattgtacgtaagagcttctgccgtaatgtcgctcgtgaccgttacggtgtgctggcccgggatgcagcaggtgatttcgtcgctttcgccgtaggcgatgatgcggtgcgaaggcatcgtcgtcagaatccgggacggtttcacggagtcgtgtgccgcgacgaaggtccggacttcggagtaggtcgttccgacggccagttgcaccgaagcgctccggctttccgaattgcagaatccggtcatgccggacgaggggacgaagcgaatgtttttccggaccatcggggcgatgttcagggtgccggtcggggtgttgtaaaaccgtttggagccgatcctggagccgtccctggtgctgagtatttccagaaacagttccgtttccgccgcgttggagaacgtgtaggcgagcgggccgaatacggaggaaaacatctccggcagagaggtgaatgtcatgtgaaaacgggtttggaagtggatgattgtgtgcggtccgagataccgtgcggtcgccggtgtcggggctgtgggcggagtcgtgcccttcgtttttttcgaaagatgcggaggcggcatcggaaaggccgatggctgctgtgcggggtgtccgggtgcctaaaaacagatgatgacgtcggctttggccgtttgggagatttctccgtgcggggtgtaggctcccgatccgggttggacggtgaggttttcgacggctatgaccttcgggtcggtgcttaactgggtgaagagatcgaagagttgcagttccgtttggctccatacctcgttgcgccgttcggacgagagctttgccccggggtgcagcagccgcagttcgacgctgtaggtcgcacgtccgtgcagacggccttcgacctccttgagccggatgggtggaagccaggctgcgggcagcaggacgatctcgcgcggggtgcggtcgtcggtatcggtgtggatcgtgtagccatacacgcctgcgagctcccggatcgcacgggtgagataggtgcggttcatgttgaaaaagttttgataaaatgtttacagatattgaaaagtctggataatttcctgacaacagaattgttgcgattgttgaaaaggtcggaaatatcctgaggccgtctgttgaaaagcggatttgtcgggacaaatataaacaatccgaataccccttgtcaagagattcgacccggaataatttcgatctgcggcaaataaagtcggtggataatttgttcggactggggttcaatctgttgcggtgacggtcgcagcggtctaatttggccttgaaaattggatatttgaaatataatagctacttttgctccgtaatatcttcgtgaagccggagtcttccggccgaaaagtggaaaatatccgtatcttccacggcggcgaagagcgaagttcaacgaaaaattcaacgatatggatgatggtgtcggttccaagcatagcggcagtgtcgtatctcaatacgataccattcatctacggtatccgccacgaaggtaactttcgtgccgatctgttgttgtcccctccttccgagtgtacgaaaaactacgtcgaagggcgtgccgatctggcgctgcttccggctgccgccgttccctcgctcaaatcgacggatgtgattaccgaatattgcatcggagccgtcggccccgtgcgaaccgtcgtgctgttgagcgacggcccggtttccgaggttcggcgcgtctttctcgatccccactcccagacctccgtgcaactggtcggttatctggccgcccatcgttggaaaatcgctcccgaatggtactctctggatgactacgaacagcttcgtcatgcgcaggagggggacgctttcctgttgatcggggacaaggtgttcgatcacgaggagaagttccgctataaatacgatttggctgccgaatggcaggccgcgaccaaactgcccttcgcctttgctgtctgggtggctcgcaagggaacgccctacgaagtcatcgaatcgttgcagcatgccctcacgttcggtttggaacatacctacgaagcgatcctcgaagcgggattcgacaaaaagccgtacgatgcctatgaatatttgacgcgtaatatcgactatatcttcgataatcaaaagcgccgggcccttcagaagttctgggattcgggactcaaggtgtcgccccgtgtaaatcccggctgaagggagtaggcagggctcatgccgccgggcggccccctgtcttgaccagttcacgcagaaagcaacccggggaaccggattaatacagggtgctttatgattacgatttacctcaagcaatacaacaagatcatccgaaacgccgataccgggctcttcgaggagttgggttacgacgatatcttgtggatcgatatgctgcaacccacgatcaaggagcagaaagcggtcgagaatttcatggagatcaacctccagaccaagcagcaggtcgaagagatcgaatcgacctcgaaatattccgaaaccgagaatgcgatcatttcgaacgccaactttttcgtgccgacgggcgagagtttcgtcatcgaacccgtgtcgttcatcatttcgaacgaaggtgtgctggtttcggtgcgccaggccgagtcgcggacgtttcaggagacggagaagcggctccagatcaactaccgcaactatccaacgggctatcatatttttatcacgttgctcgaagtgcggatcgactacgatgccgacatggtcgagctgatcgcccgtcaggtgtcgtcgttgagccgcaatatcaatggcgaggattcgatcgacaaggaggtgctgcgtcgcatcaataccttgcaggagagtacgatgttgctgcgggagaacatcttcgaccgccagcgcgtgctgtcgggcattctgcgcagcgaacggttcccgaacgatatctacccgcgtttgcagttgatgatcaaggacgtgaattcgctcatcaaccatgccgatttcagttttcagcgtctggactatatccaggatgcggcactgggtcttatcaatatcgagcagaacgagatcgtaaagatcttctcggtggctgctgtggttttcatgcccgcgacgttgatcgcaagtatttatggcatgaacttttcgatcatgcccgagctgcactggaaatacggctacctgtttgccatcggcttgatgttgctctgttcggggcttacgatctggttcttccgattcaagaagtggttataaagacagtccgcttcgacttcggcttcattttcgtcggtcggggtgttttttaccttttcagaaagtcgttcccgaaaccggggagaaataaagtacggatatgacaagacaaatagccgatccactgcggatcggctattttacaattacccgaatttgtgctgccggctattgcaacgcaggatcgacctccggcgtgcaggttatcgaggcggtcttgaccgtgccatccgaagtggtgaactccaccgtaaaagtatgcacttcgcccggattgtcgggaaccgacgtaaaataaagtataaacgagtaaatcgacaaggaggaaagagtgtattcgaccacccgcagatcgtcgggttgcaaagccgacaacggtttgttgtatagaaatagaatttctttcccaagatcggaataagaatgataatcgttctctatgtattcggcatagcttacataccgaactcccattttatcgttcaacggcgatcctgccgggtatttggcgctccaatctttgtcgctggtaacttttatgccggtgaaattgtctgcgaatgcggtcaaatccgaccatggaagcgacttcagattgttgtattccgtatcgtgattgcgctctgcgattcgaagaaaatcgtcggtatgctgcgccccctcctgttccggtgtctgatagtacaccggatcctccagaagtacctgaaatccggacatggaatagagcgtcgatggtttttcagccagcatgccgtataaaacatagctcccgtccacataattttgaacgagatatttcgaatagccggatccatttccaatccactcctccggttcgttgcaaccaaccagactactcaaaaaaatataaatcaataactttttcatttgctcaaattataagtgacggccgaaaaatcatgatcgtaatctctgtcttctattgactgcgggctgacaggtcccctgtctgtatagaacgcattgaatgtatagtatccgtctttttgtcctccccagccgaaattggcatgcacaaattctttcgactctgtgtggtattgagtaggcaaaaaagcatatctggttatcacgcgtctttcacggagcaaccaaccgtccaatacccatgcgtgactattagtactgctcttcccggaataataaaatggaagttttttcacgaaaatcatatcccgaactttgtcggtagttataggcgataaagctatatttgaatagcctagtcctatgtcacccaaatattggagtaacttcactacgtttttcgttggggcgggagaacctccgtcgtcactgtggtatttcacaccaactgcctctcccattttattgatgaaataggctacagcccatgtttgggcattcatggattccccacttacaacaggtttcactaactggggatgtgttaccgcttcttcgatattaagccacatggcttcattcaaaagctgatctcctatttgataaaattttttattataatttaaagcgttgaaaactaaaatttgtgcaactgctaccgggacacatccggcaaaacagtttttgccattttcaattgggcataaataattatatggtttggtttggttccatcgggttttgaggagaatgcctgattgttctttggtttcccaaggttcatagtcaataccgacaggttgttgtccttccggccaccaatgttctatatcggtaatagggcctccgacgatgccgtttccgccaccgccggtatcgacacctccgatcgcggcctgtgcaaccatttgcagggggaataccaactcaccgtccgcttcggcctgttcgggagtaaccgttacggcataccggaactcttcggtcgtgaggcttccttcatcgacgaccgcatagaccggctccaaccggtcgtcggcccccagaatggcatagcccgcctcgttctcgaaattgacgatgtagagcagatcctccacgtcggccgtggcttcgctgcgggtaccgccgggacttaacgcttcgggagaaaccgtcgtcacgtttttcacacgccgtatgccgccgctgcgggtgacagcgccgtcttccgccggagcgtcgatcgcctcgagaaggccttgcaaatcctcaagggcttgttcgacggggacgacgtgcgagattttctgctcggggacggacggaggttgggggacttcctctgtggtcaagtcactggtacagccgacaagcaaccctaaaattgccagtagcgacaaatacttcatgtttttcatatcaaattagggttaaagcgaataaaatgacaaattcagagatgtttttattaaaaaaacaaaaatcgtgcaattatttttgaatattcaaacttttgcaatgtgaaatcgagcgaaaaatcttttgtcggtttggatatatacgacaaaaccgaccgggcaagggcgtcccgccttccgtcgcattttcgcgccgacttttcaccatccttccctcccgccgcaccgaccggcctccggtccgttgcgcagatcgaaagctccgtagtaataatacccgttggctgtccctccccatccgaaattgcataacgctgtcaatcaatctttagcgcaaatttaacgttttttttgttaatctgcgacaaaattgattactatatgtacagatgataatagagatcgctaccttgttcgggggaataaactatatcccatcatgaaagatgggattaatgaacttcctcttgtaaaaatttcaaaaaaacaagcaaaaatagaactacaagattatccattttattacaatgtgaaagattaattaaagattgtctaacaaatccgtgaaattgaaagccccccccctgtcagagtgcattctgacagaggtgaaaatgttagaatcggacttgttaggcagcccgttttaatttttggcattttggtagtgcccgaacgcacgtttaccgtcgccgaaagccgcggacgatcgaaaaaatcgtttcggaggcaggaacctcgccctgctgtttcatccgccagatcgtacgtaccatataccgctcgatgtcccggtagagccgtttgaaaagagggcagtcctgataattctcgttgtcgagcagtacgtcccggatcgatcgctgggtattggtgtaattgctcatttcgtttttcagcgccacgccctcctttttcgaggcagtgattcgcgctgcagtcatctgacgcagtttttcgcatacggtttccagcagcaccatcaccacgttgtccatcaacgtgtgcccgtgcatatagagataggtcgtttcgggcgtcaccccgagccgaccgagctgtgcggcgaaatcgtccaactccgccgcctgtttgggatgcttgctggcgagcgtttgctcgcggcgggcgacattgcgctgtaaccaggcgatcgtccgggccccgttatcctccaaatcgaggtagttgagccttaccgaagacttgaaatcgacaagagtgaacacatgctcgtccgacagcttcgccgaataggcataccaaagaaaaagacggtaaatcgtgcgggaatagtcggccatgaagcgttcgaaatcgaagattcgggtatcgttcttggtcgccttgacgcagacgttgtgcagcgagggagcatagcagaggtaattctccgtggcataggtgtaagtatggaacatataccgtgagtcgcggatcaggcgcgattgctctgtcgctccgttgaacaggaaatcgaaatccgaatccacgcaaagcaacattctctccgacgattcgggaatcatcgacatcagcaccttcttgcctttgggcaggtctttgcgggtcggcaccgatatttcgaaatagaggtaaggattggcgaaacagtcgaagacgccccgccagaaagccacgtcctcataaccttcgacgaagaccttcacgactcgcagcgacgggtcgcccggtagtggccggggcagcggaccgtcgtttttcctggcaaacggattgatccgccgcagtttatcggtgatttttctcatgtcgttttacaaaggtagtaaaaatgagggcagaataaacaaacttgtttgttttattctgtcgaagttttcgatacccctttatccgacggtcgcagcatcgaatccgcaggatgcttattcgcggcccgggccgtgtctgtaataccaacgttcccctgaattccctccttggaagggccttgggaagctcggttctcaaagagattcctaaagtacataatcacgttcgaaaaatatgttttgatttcatgctatctattacataaagtcgggaggaagtaatagtcatagcatcaggtctttcttttgcaatttcacggattttataaatcaagttgctaatttagctccgggagaatacttatacgaaaaaggagaatttcataaaatataaggaataagaaagtcgaaagagtcggattggatttccccgttcaataattatattttgatgttctgttttattactattattattctattttttgcattatgggcaagaaccgggtttatcagtttttaacttagctcgtaactatgagcatgcccggaaaccttctgattcccgaggcttatctatttggactgttgaagtaaaaattatttgtcggaacaagcattgtgcgcatgtccgatcgattttgtcgggttggatgaacgagatcttaaaagaaaagaacgattgaaaggagtaatagtaattgtagaaagagttgaaataggagatgatctggttgtatcttagtaggttcgttaaaaaataacggttgttgtgcgttgtttcggagaaaatccttatatttgcatcgcgttgaatcccgaatgggaaacggacgcgatgcgcgaaggttgcgaaaggtagtttgagagagtggtgcggaaattttcttcttgtgaattttttgaaaaatttggaggaaagaaaataatggttacctttgcagtcccgagccatttttaacgggagcttagctcagctggttcagagcgtctgccttacaagcagagggtcgggggttcgaatccctcagctcccacaaaatcgaaaatcggatgaaagccactcaattttttgagtggcttttttattgctggttttacgagaaggtgttctttgagaagaggatctgcggaggaatgaatgtgatggcattggttttacgtaggatgtgaaaaagtaggattttttcgatgcttcggtttgttctaaacgaggattttagtattttatttatacatcaaaagtattaagtcgtttaatgcgaggaaatttcgtttaaaacatttgaacgcgtgcgggaatccgttcgtaccggtacggttttttggcacgtgttttgtttttctgaaggagccgggtcggagcaatagcccgattccggcgaggtttcttcatttatttaagtttgggttagtagtttaggagggtaacctccgaaggcggaaagcagtcgagaagactcctttccgtttttttgtgcctgctgaagaaggcaggcaggacgatttctgttagtgttatttttagaagacaaggtctgccggatattgggctatctgttcatggcaggggctgtggggcgctccggaaggttcgacgaactcttgccgggatacctttgttcggggacgtttggagcctatcgcattttgtagctgatccgggcagaagtttccgggcaggtcgtttcggcgattggggattgggtcgttttgccttcccttcctctttccttttgactgttggcgggcttcctcccggctgtccaggttgtcgggggaggagcgacgtcggggtgatttttgcgtgcagacggtgtcccggtcgctgctcggggtgtttcgggaatcggtcgtgaaacggctgaaattatccgggcaggtcgttattccgcttcgtttcgtggtttttcgcaaagaattttgcctttttcgggaaaaacttgtatcttcgtttcgattgtagggaaatgcggaccggtttttgcatctctcctaaatccccgggcggatgaagatttcgccgggtttggtttaataattaaaaagaaacaacgatatgtcgataacgaagttcaaaggacagccggtgcagattgccggtgaatttgtcaaggcaggagctgcggctcccgatttcgaattggtcaagaccgatctttccaccctttctctgaaggatttgcgtggaaagcaggtgatcctgaatatttttccgagcctcgatacgggcgtttgcgccgcgtcggtgcgtaagttcaacaaactcgcggcggagctgccgggaacggtcgtgctggccgtttcgaaagacctgcctttcgctcatgcgcgtttttgcacggtcgagggaatcgagaatgtcgttcccgtgtcggatttccggaaaacctcgttcgatgagagctacggcgtgctgatgaccgatggcccgttgaaagggttgctggctcgttcggtggtggtcatcgacggggacggcaaagtcgtctataccgaattggtgcccgagatcacgcaggagcccgattatgacaaggcgctcgctgcggtgaagagatagccgcgaggctgaaaatcgaaggaagccggccgtagcggatttttctgcgtcgcgctttgtcgcggaagtctttctgtcgtggacagatcgcgcctccggattcacgcaagacttgaacaggtgctttggtccgacttcttggaacagcgtcccgtcactatgtggcgggacgtcgtcgtttatttccataggggcttgccgcttttcgtatctttaattttgttgtggatattttgttccggcaaaacacaaatttatttgcttttgcgttcggttcgttcgcatcttggacgaagcctaagatactttcgttcggtaagatacgaatggggccgctttgccctcgcttatccgtatctttgcagaagataggatgcggttcggcaatctctgcgtgcaagcccgcacgattcctctctccttttcctatctttgacatagtcttagataggatgcgcctcggaaaacagggaccaagttcccgttttctctcgcctttcactatctttgacttcgcctggataaaatcggattccggttgtgtttgccccggctttttcgtattttgacttcgtcttagatacttcgcctcggcaaaatgcaaataaatttgcttttgcactcggcttatttgtatttttgtcttcgatagcggctgtttttacacgatatggagattgtttatcacataaaaccttttgcggaactttcggtgggggagctgcatgcggcagcttcgctgcgcgaacgggtcttctacctcgagcagcatgtcacgacgctcgatgccgatgagaaggatcccttttctttcttcctgtgggccgagtgcgaggggcagacggtcggatttctgcggatgattccgcgtgggattgcttatgccgaaccgtcgatcggacgcgtttgcgttgcccgaacgtaccgccgtcggggaatatgccggcagatggtgagccgggctatcggttacatggttcgggagtggcgggcggaagcgatccgcatttcggcccaaagctatttgatacccttttacgaatcatttggattcgaggtcgtatcggacgaatacctggaagcgggcattccgcataagaaaatgctgattcgcctggatcgggaacatgggcgagaagcgtgaagcctgcggtgaaagaaaccgtcgcacctgcttttcgccagccttgtaacgacaaagcgactgcgagcctgcgcgacgggaaataataccactttttatttttaactcgttattaaccatctttcgtatgtgcataaaacataccaagcgaaaaattttggaatcgtgtgcggagagaaaaacgataggggcgggcgaaacatttttatttttcgatccgaaatcggttcggtaacgggtggaatccgaaggcatggaagaatttatcgcttcgctgacgcaattttttaccgactggggttatgtcggtctttttctctcggctttcgtcgccgggagtatcctgccgttcagttccgaggtcgtgctggtgattctggtgcggatggggctcgatcctctgctctgtctgttcgctgccgcttcggggaatacgctcggcggtatgacctgctattggatcgggcatttgggcaagcgggactggattacccgttacctgcgggtcgagccggcgaaaatcgaccgggtttcccgttttctcgaagggaaaggggccttgttcgcttttttcacctttctgccctatgtcggcgaagccgtcgccatcgtactcggcctgatgcgcagcaatgtctggattacggccgttgcgatgttcgtcggcaaattgctccgttacgtggcgattgtggctgctttgcagggagtgctttcgtggttttgaggctgtcggctgccggaacttgcgtgcggcacggcgaacggcatatatcttgttgcgtcgagaatagatagacttggttatgaatcaaagaatccaaaaacaaaatatccgggagaaatattggcgctattcgctctatgtcattcttctggggctgggtacggttatttttgtagaactgattccctttctgggcggcctgttgggagcccttacgatttatgtactgctgcgcgggcagatgcgggcgctgacgatccgccataaattgcggcgtagcctggccgcttcgctgctgatcggtgaagccatcgtctgttttctgattccgctgtctctgctcgtgtggttgcttgtcgctaaattgcaggatgtgaccctcgatccctcgactgttattcagcccattcggaacctggcggagctgattcgagagcggatcggctataacttgctggacggggataatatcgccaaactggtggagctgctgcctcgggccgggcagtgggtattgcagagcatcggcagctttgcggtcaatgtggtggtgctgctgttcgttctctattttatgttgatcggcggtcgggagatggagagctatctacgcaagttcatcccttttaaccggacggttactcaggagtttacgcgcgaagtggtgatgatcgtccgttcgaatgcaatcggcattcccttgctcgcggtcatacagggggcggtcgctctggtcggctattggttgtgcggtgtgccgtgggcgctgttttggggcgtagtaacttgtgtcgctacgatcgttccgctgctcggaacggcgctcgtatggctgcctttggcggcttacctggggctgatcgggcattggggcgcagccgtcgggcttttggcgtatggggtggtggtcattacgcaggtcgataacctggcccgcttcgtcctgcagaaacggatggccgacacgcatcctctggtgacgattttcggcgtgattatcggcttgtcgcttttcggtttcatgggggtaatcttcggtccggtgcttctctccatctttattttctgtgcggatcttttcaaacggcgctatctcgatgaagctccgatgaacgaagtacttgcctcgcctgcggaacgttcgtcggaatccggcagggaatgaatttccggcagttctatcgctgtatgtgcagaaatcgcagcggcatcgctcccggcgcaggctgtttcgcgggttgcagtcgtttgcgaatccgaattgccggttggaactacggacgggggaaatgcctgcgtattgtttgcccgttacggcgaaggcgggaccgaggttgtcggcccgatctttttcggggaatgacaggatactcggtttgctgcgattcttgttaaaggacggggagggaataatcgtgtgacgaagcctctgtttttcggattattgttgttgcgggagcggtcgttggctgcggccggccgatttggagcgggggagttgcaaacggaggttgtccgtatgaggatttggccgggtatgcgtgttttacttgaaaccgaggtgtgattcatatgtccgtatcgtggaatccttggcacgggtgtcagcgtgtgagcgaaggttgccgggagtgttatgtttatcgccaggatgctgcctggcaaaaggacggcgggcacgttgtgaaaacgacggccttcagcctccccgtgcgccgaagtcgggacggccggtggaaaattccggccggggagatggtgtttacctgttttacatcggactttctgcttgccgaggccgatgtctggcgccgtgaggcatgggagatgatccgtttgcggcgggacctgcattttatgttttttaccaagcgtatcgaccggttgtccgagtgtctgcccggggactggggtgcagggtacgagcatgtgacgatcggttgcacggtggagaatcagcggatggccgattatcggctgccgattttccagaagttgccgattcgtcacaagattatcgtttgcgccccgctgataggtcccatagatttggccccgtatctcggaccggaaatcgaacaggtatctgtcggcggcgagtcgggtcccgaagcgcgtgtttgcgattatgcctgggtgctctccctgcgggatcagtgtgcggaacacgatgtttccttttgctttcaccagaccggggcgcgtctgctcaaggacggacgtctgtaccggattcggcggcagtttcagcatacgcaggctcggaaagccgggatcgattttaaggcaggagggtgatgttatgtgcacttgcataaaaaatccgacactgtcagcagtgccggattaaatttaggaaatggcattttccctgtgggaggttaaaaatccatttcgatcacgcgatgctgtttgtcgaacttgatctccattctgttgtcgagttttacctcggtgctgcgtgtatctctttcgatctgtacgatcttgttgtcgggatagttgtcggcgacgtacttggcgatcggtgcagggatgattccggtcggaacggcgctgtacttgcaatcgatgtcggtccactcgcccttgcggtcgaactcgatcttgtcgccgtttttgaacgcgatttcatagcttttccgaaaatcggattcttctttggcaaaagccacttttcgatccccgaaatatttcttgatgaactgctgtgctgtctggggcagttgcgaaacttggatcggtttatcgttgccggccgaggctgttgtggccagtaccaacatactgacgaacaatactacgatttttttcatattttttacaattaaagttgtattgtttatccttgcaaaattgaggcctaattataaatttcgtttttgatgcagaccggcggtttcataaaaaagaggatcgctgaattttcagcaatcctcttttcttggggatgaatgcgattactccttgccggccaggggcgctgcctgcgtataagtgcgagtcgccagctccttgtcgagcatgaatacacccatcttatctcctgaaacgagcttgagcgagtcgatgattgtcgtggcgctctcttcttcctcgacctgttcgtcgatgaaccatttgagcatacttgccgttgcatggtctttctctgtaacagccatgtcgtacaggttgttgatcattgccgtaaccttcttttcatgagccagcgtatcttcgaaagcctcgagctggcttccccacgatgttctcacttcggcgatcggagccagcagaacctgtccgccgcgtgcgagcagatagttcatcagaatgcgggcgtgatcctgttcctcgcggaattggataaagaaccagttgccgaaacctttgaggcctttcgattccgcctcgaccgacatagacagatagagatatgccgaccacatttcggcattgatttgcgcattgagtgcgtcttgtagtttcttgctgatcataactattttgttaaattgttaaatttcctgtttttccgttattttccgcgaactcttccgcagctgtcgttcgtcgaaaatgtcgagcgaaacatttctctttttcggtcggagagtcccggactccggttttgtcgttgcttcgtcaatcgctttaccctgcaaaaatagtgcaagtctaaaacgaggcggaaccggccatcgcccggaggcttttactttatgcaaatataagcaaataacgtctatttcgtgcagatttttttatacgattatttgatctcgacataggggaaaacaataaacgatgcccgactttagtcgggcatcgtttgaaagtattttgtttgaaaaattagcagttttcgccgtcgtaagcccattttacatagatggaaccccacgtatatccgccgccgaacgacgccagaatcaggttgtcccctttgcagagagccgcttcgtattcatacaggcaaagcggaatcgtcgctgcggtcgtgttaccgttgcggtcgatattgatcatacatttctcgcgtcccaatcccatacgtttggccgtcgcgtcgatgatacgcaagttggcctgatggggtaccagatagcggatgtcctgggcggtcagatggtggcgttgcatcatctcctccgatacgttggccatgttcgatacggctgccttgaaaacggctggcccgtcctgggtgatcgtgtgccagttgttgcgcacggtttcttcggaagcgggatagcgcgagccgcctgctttcatatagaggtgttgttcgcccgaaccgtccgaatggaggatcgcatcgatgacgccgtaaccctctttgttgggttccagcaatacggccgctgcgccgtcgccgaaaatcggacaagtgttgcggtccttgtaatcgacgatcgaggacatcttgtcggcgccgacgacgattacttttttggcatagcccgtttcgatgaactgggaccctgtcgtcagggcgaacaggaagccgctgcatgcagcggaaatgtcgtaggcgaaagcgtttttacaaccggcctggtcggcgatcagattgcccgtcgaggggaaaaacatatccggggtaaccgtggcgcagatcacgatgtcgatctccagcggattaaccccggttttttccagcaggtctttgatggcgcgtgcgcccatataagatgtacccaacccctctcccttgaggatatggcgggttttgatgccgatgcgtgtcatgatccactcgtcggaagtgtccaccattcggcttaattcgtcgttggtaagcagataatcaggcaggtaggcccctacacctgtaattgccgctgtaattttcttcattcggggagcggtttagtttttgaaagcattctgcaacttcgcggtcacgccggtttgggcgcaacgttcggtcgtaagaatcatatttttgattgccagcgccgaagaacatccgtgtccgatgactaccggggcgttgacaccgagtaccggcgtgccgcccacgtattcgtagttcatatccctccagaacggagtttcggggattttaagcgctttgttgatccggaaaagcccctctacggttttcagcagcgtattgccgacaaaaccgtcgcagacgatcacgtcggctacctgccccgagaagaggtgagaaccttcgacgttgccgacgaagttgaactcttcggattctttcatcagttcataggccgccttgctttgggcgttgcctttggtttcctcctctccgatattcagtaccgcgacccggggattccggatcccgagcatagcctgggcgtaaatcgaaccgataatgccgtattgagccaatacttcgggcttgcaatcgacgttcagacctacgtcgagcagcaggactttcccgcccgtgacggtcggagcgaccgtggagatcgtgggacgtatcacgccttcgatcggcttgacggcctgcatcgaacccaccatcatcgctccggtgctgccggcgctggcgaagccgttgatgagtcctttggccagataaccgaacccgacgacgatgcttgaattggtcttttgctggaaggctttggccggatggtcgcccatttcgatcacttcggtcgtatgtacgatatcgaaccggtccgccgcacagttttccgctttcaggactgcccgaatccgatcctcgtcgccgaagagtacgatccggcattcgtcgccgattgcatcgacggccattacggcgcctttgactgctgcctccggggcgaaatcgcctcccatggcatctacaccaatctttaacataatctgagatttggttagtaaaatagattacgctctttcggctgaaaatccgaaagggacccggcggcggagattattccgccgctttcttctcgatagccagcttgccgcgatagaagccgcattcggggcatacccggtggtagagtaccgatgcgccgcagttcgagcaggttacgaccgtgggaacgactgctttgtagtgagttctacgcttgtcgcggcgggttgacgagattttgtgtttaggatgtgccattttgtattatcaattattagtttaatgtttcttgtctttttcttcctgctccatctgttgtttgatggcggacagttgttcggtccattgtccggagcccgaggcctctctttcccgctgttgcgtttcgttctcgatcgtttcgaactcctgctcggaaacgatgcggaagcgtcccaacatatccggatcgcactccccgtcggggtgcacccgctgatagggcagagaaaggacgatgctttcgtaaatatattgcgtcagatccacgaaatcttccgagggtgagagccacaaggtatctccgtcgtattcgcggacttcgtcggagaatttcaccagcaattctccttcgtaatcgatcggaacggaacaatcgcccagacagcgatcgcactccaccactacgctgccccggatcgaaatctcgaggcgaagctgacgtgccgcccgtaaaagattcaccttcacgtcgcagtgcccgcctttgatttcggtgttttcgaaaagccggaacaggtcgtcgcccgcttcgaagtcgaacgtatgttctccctccgagaggcctttccaggcgatggaatattttcgtgcggcgttcatttcgatacttccagtctgcaaagttatgaaaaaaacggaaaagtaccaaaggtttcgccggttttagcgactctccccgcagggacgtgtgccggaatgattccgagtgccgtctgccggcggtgtatccaggagagattgttgcccggatgtgtgggacatagcgataaaaaagttatatttgtcctgtgatgaaatccgttgaaaaatttacggtcgaaatccggagtggcttcgaccagtggtggcgttacaatgccgcgctgatgtgcggggcgttcgatgcctcgggtaaccggatcggctttgcctcggccgagagccgggtggctgagatggggagcaatctggaggcaccgccggaggggttggacctgcatcgcagtcttacgctcgaaaccgttccgtgcgagcgtatcgtgctctatatttatgtgatccctcatacgctgccccgcgacaacgaaatcgggggacatcctccgttcccgttgcaggtgcggattcgctatggcgaccggaccgtgctcgataaggagtattccatcaaccagtggggaggggcgtcgatcgagctcaaggtgtcgcggccgtgatgcgggcctgcggccgtaggtcgatgcgtctatggccccaattttccgacctccgttctgaacctgttgcgatcgtaataaaagaggttctccaaaattttggagaacctctttttatccgtgtaacgagggattatttgttgttgtatgcggccatcttaccgatcagcataatgatcttgttcgaatagccccattcgttgtcgtaccacgaaacgagtttcataaagcgatcgttcagggcgataccggccttggcatcgaagatcgacgtacgggggtcgctcgtgaaatcggtcgaaaccacgtcgtcctcggtgtaacccaggatacccttgagttcgttttccgaagcgtgtttaacggcggctttcacctcgtcgtaagtcgctgccttttccaaacgcacggtcagatcgactaccgaaacgtcgagcgtcggaacgcggaacgacataccggtcagtttgcctgccagcgcggggattaccttgcctacggccttggctgcacccgtcgaagaggggatgatgttgccgatcgacgcacggccgccgcgccagtccttcatcgaaggaccatctacggtcttctgcgtagcggtagtcgcatgtacggtagtcatcagaccttcgatgatgccgaacttgtcgttgatgaccttggccagcggagccaggcagttggtcgtgcacgatgcgttcgatacgatatcctggcctgcgtaggtatcggcgttcacgccgcatacgaacatcggggtatcgtctttcgagggggccgacataacgacgtatttggcgccggccttcaggtgggcctccgacttttcgcgggtcaggaacagaccggtcgattcaacgatgtattctgcgcctacttcgttccacttgaggttcgcgggatctttctctgcggttacgcggatctcgtgtccgttaaccaccagcttgtcgccctttacctcgaccgtaccgtcgaaacgaccgtgtaccgagtcgtatttgagcatgtaggccatataatcgaccggaatgaggtcgttgatgcctactacttcgatagtgtctgcgtgggtgcaggcagcccggaataccaaccggccgatgcgaccgaaaccgttgataccaactttgatctttgacatgacgtattttattttaggtaaatattcgttgtcgattttccctttcggaagaacaaaattatacactttatcctttataaacaaatatactcgcaaatatttcgccagaatacggcggaaggccggaaaactttccggccttccgatcgtcaggcgtatcagttcgttattctccgtcgggagtcatctgtttggctcgtttggccatggccgaagcgaagacgaaatcgttcagctctctgttgcgggcgtgcagaatttcctctttggttccttcccaccacttgcgtccttcgtggatatagacgatcttctcgccgatctccatgaccgaattcatatcgtgggtgttgatgatcgtggtgatgccgtattcctgggtgatctcgtggatcaggttgtcgatcacgatcgaagtctgggggtcgaggcccgagttgggttcgtcgcagaagaggtatttgggattcagtacgatggcccgggcgatagccgcacgcttgatcataccgcccgacagttctgcggggtagaggtgattggctccgttgagccgcacgcgctggaggcagaaattgacccgttccatcttctccttttcgctttgctcggtgaagaggtcgagcggaagcttgacgttctcctcgacggtcgaggagtcgagcagcgcaccgccctggaagagcatgccgatatcgcggcggatcgcctttcgctccttgaatccgagggccgtgaagtcgatgtcgtcgtaccagatactgccggaatcgacttcgtgcaggcccaccagacatttgagcagcaccgtcttgcccgagccgctcttgccgatcaccaggttggtcgtgccggtgtcgaattcgacgctgacgtcgtcgagaacgacgcgtccgtcgaaggatttcgagatatggtctgccttgatcatataagcaggatttgggtgagaatcaagttgaagatcatgatgacgatcgagctggccacgaccgccttggtcgaggcggcccccacttcgagcgagttgcccttggcgtagtagccgtagaaggccgaaatcgaggtgatgatgaaggcgaaaacggccatcttgataagtgtgtaggtgatcgagtagggtcggaagtcgtatagcaggccctgcacgtagtcgtcgggaatcatgatgcccgtcagcgctgaaatcaggtagccgcctgcaataccgatcaggatactcaggatcgccaggaaggggaagaaaagcacggttgcgacgatcttcggcaggatcaggtacgacgccgaattgacacccatgatttccagggcgtcgatctgttcggtaatgcgcatcgtgccgatttcggaggcgatgctcgaccctaccttgccggccaggatcagggctacgaccgtcgaggagaactcgaggatcatcgtctcgcgcgtggcgtagccgatgatgtatttggggatgaacggcgattcgaggttgatcgacatctggagcgtgatgaccgcaccgatgaaaacggagatgatcgccgtcaggccgatcgagttcaatcccagcgactccatttcatagatgatgcgacgacggtagatcgcccgcttctccggccgggagaagaccttgcccatcaggataaagtaacggccgatcagttcgaagattttcagcataacgttttttactgcttgtccgggtcgtttttgtcggtttctgttgcggggacttcttcgaattcgatgtagtcgcccacgtccttgcggacgcgtttttcaccggcacctttcgttttgcggatatggatttcgccttcgcgggcattgccggcaggaccgccggatcctccgggaccgaagccctgaccgccgaattgatcttctaagtctttccgcatgcggtaaattctccagcggaaggagagaaggaggataatggccagcacgaccaggcccaggagtgcatagagaacgaacatggcgataccgcccaataccgaaggggcaaagagcgccagcaggaagatcagcagacagaaaagcggattgcgccggatgaagccgacgattccgtcgatgattgctatcagtagattcattgattcagtgtcattgatataaggtgttgcaaaggtagtgaaaacgaggacagaataaaataaacgggtttattttttatgtcgagtgtcttccggtcttcccgaaaggtagtgaaaacaccgatatccgccttctataaaggtagaaaaaatcggtcattcccggagaatcggtgtgatttctcgattaaaagtgctaattttgaagcctaaaatcaaatctgcatcggaatattatgttgttgaacaaacttactgccatttctcccgtggacggtcgctaccgaaatcaaacggagaaactggccgattatttttcggagtatgccctgattcgctaccgcattcgggtcgaggtcgaatatttcatcgccctgtgcgagttgccgctaccggaactgtccggggtcgaaaagtcgaaattcgaagcgctgcgggcgctctacctcgatttctcggaggcggatgcactgcgtgtcaaggagatcgaagccacgaccaaccacgacgtcaaggcgatcgaatatattctgaaggagaagatggaggcgctcggcctttcggcctacaaggagttcgtgcatttcggcctcacttcgcaggacatcaacaacacctccattccgctgactatcaaggatgcgctcgcggaggtttacttccccgcagcggccgaggtgcttgaccggcttcgggagatggcccgcgaatggcacgacgtaccgatgttggcccgtacgcacggccagcctgcgtcgcccacccgtttgggtaaggagatgctggtcttcgtcgagcggcttgagaagcagttggcgcaactgcgcacgctgcccgtgcctgccaagttcggcggtgcgacgggcaatttcaacgcgcatcacgtagcttatcctgcggtggattgggtggcttttgccaatggatttgtgaacgaccgcctggggctggagcgttcgcaatatacgacccagatcgagcattacgacaacctggcggcgattttcgataacctcaaacgcatcgacaccgtgctgatcgacctctgccgcgatatgtggatgtatatttcgatggagtatttcaagcagcggatcaaggccggcgaggtgggttcgagcgcgatgcctcataaagtgaatccgatcgacttcgagaatgccgaggggaacttcggcatcgccaatgcgatttacgaacatcttgcctcgaagctgcccttgtcgcgtttgcagcgcgatctgaccgattcgaccgtgttgcgcaacgtcggcgtgccgatggcccattcgctcatcggcctgcggtcgctgctcaaggggctcaataagctgctcctgaaccgcgaggcgctcgaccgcgatttggaaaacaactgggcagtcgtggccgaaggtatccagaccgtgttgcgccgggcgggttatccctcgccttacgaggcgctcaaggccctcacccgcaccaacgcacacattacccgggaatcgatcgccgagttcatcgaatcgctcgacgtggccgagagtgtgaagcaggagttgcgggcaatcactccgcaaagctatacgggagtattcgaatagccgttcagccggaaaggaaatcaaatcgccataacaaggagtcctcgttttcggggattccttttttatcttggaaactttgtatgaggtgcggttttatcccggatctgtttcgtgtgtcgagacgttgtcgggagaggcgattgtctgtcgcttgccgtggcggttatagtcatgaccttctctgaattttcttttcgaagggaatcttcggatacaatgcggattccgaattatttttttgcattgtctttgtaataatctattcaattataaaaaagactgattgtgagaactgtattgagatttttatttcctgcgaaaagttgttctgcgaaggcatcgggcattttgttggcatcccgcatgattttcggcggactgttgttttcgcatggcattgccaagtggagtaatttcgatacgatgtccacgatgttccccgatccgctcgggatcggcagcagtgcttcgctgtcgctggcaatcttcggcgaagtgatctgttctctgggatttatcgtcggtgcgttttaccggctggcattgatcccgatgatctttaccatgtgcattgcatttttcgttattcacggcgcagatccgtttgcggtgaaagagctggcactggtttatctggcgattttcgtcttgatgtatattgcgggtcccggaaattattcggtggaccgtttgatcgctaaaaaaatcggcggcgggaaatagcggccgaatcggtgcaatgatgccgaatttttatcattagttaatcaataagatctcgggcggccaggctgccgttgttgcaaatgcacgttggatgctgcatattgccaataagtgccaatatccatttgattcgatgcgggaaggcgaaaggtgccgatgcagggcgcctttcgctgtattcgtacccgttgttcgtccggggtttcgagtttgttcgacgctgttcgggcagcttgcgcccgttaaatggaaaaatatctgttcggggtcgataattgtgtgaatacccggttgtcgaattgattttttatttatatttgtaatatcaaaacacggggtatgccccggtaaggcgtaaataaacccggatattgctttgcagcctatttgccgcaggcggatttcgattcggtccggttgcgtctcggcgtgaaggtaatagaataggtttatcccggattgttaatggattgataacacaattataaaaataccgatatgaaaaaactctacttcttctgcatagcgctcgtggcgctgatgctcgcatcgtgtggcggtaaggattaccgcgagatgctgccggccgactctttcgtgatcgtttcgatcaatcccgaatccctgtcccggaaagcgcaggtcggcgattttacccaaagcgtttattataagatggccgagcaagctttggccgatgcgcccgaagaggagcgcggacgcatcctctctttgttggcgcatccttcggaaacggggctggatgtgggcagcgacgtgtttatgttcgtgacgatggagaatgcgtcgcagacaggcaatcctacggtcggcggtttgttcaaggtgggtgatcgcaagaagctcgatagtttcctgggctggctttcgcagaagagcggtttcacctcgttcgaagaggatggaatcaccttccttgccaatacgcagggcgcggatatgcctgtcgtcgcttatgacgaaacggcccttttggtctataccgctcccgttgacaatgatcaggcgaaagctgccgccaagaagctcttcgcccagaagaaaacagagagtctgatgggcaattcgcagctggcacaggccatcgagcgtcccagcgatatgaagttcgtgatggattacggttcggttatggcggtagccggagagcagatcggcacggccggattgtcgggtttcgagttcctgaacaagatgtcgatggcgatgccggtcgatttcgagaagggtaagatcgtggccgaggcgcggattctcttcagcgacaaggaggccgaaaaacagtatatggagatggtggcggctcagcgtaagatggacggcgattttctgaagatgctgcctgcggagaatgtagcgacgctcgcgggcagtatggacggcaccagaacttacgaaatgcttcagaaaattccgatgtattcgatggtcttcgccatggctccgcaggtgaagccgatcatggaggcgatcgacggcgacatcgctttgtcgttccacgggatgacggacaacggccggatgccggagctttcgctgatcgcggagctgaaggatccggcgatcatggaaacgatcaaagggatgattcccgtgccgatgcaggagatggctcccggccagtatgcgttgagcccggatgccaatacgacgatctatttcggtttgaacgacaatacgttctatgcgacgaccgattccgacgccctggtattcctgaccggagcacagacctctgcatacgaggccgaggtcggcaaactgttccgaggctcttacggtacgatgtttgtcgatttcccggccgtgcgcagcctgatcgagagcctgatcgcacagaaccggctcgatcagtcggcagccgcatcgctcatggcgctttcgttgttcgatacgctggagatcaccggccgtacggagcgtcagggcgagcttgtcctgaatatgacggataaggataagaatgccgccgaggttctttacaagaccatcgagggctttgcccagatgttcgcggcgactatgttttaagtcggaagagtccggacagtcgttttgcggattaacgggtttttcccggaatagcggcggctgtgcgaggcgatattttgatatttcgttcgacgtggacggcgagtgcggtcgagtttcgtgctgcccatgttggagaaaaaggatcgatcattcgactctgcgcggctggcatttcgcctgccgcgcagtcgtcgtaatgttcccggctcgtgggcgggttcgccttcctgcccggcggggtgaatgaagaaggagattggacgatggataaaatcggattgcggcaggtgctgccggatgtttttgcggataatccgcccgtggggtcggagatttggcggagggatgtaacgttcgacaagggacgtgtatatctggtcgaagcggcttcgggatcgggaaagtcgtcgttttgtggctatttgtacggctaccggcgcgattattcgggaacgattcttttcgatgaccgggatattcgcgggttgagcgtcggggagtggagcggcctgcgctgccgttcgcttgcgatgatgttccagggactgcgtctttttccggagttgagcgccgtggataatgtgcgtctgaagaacaacctgacgggccgccgctccgaggcggagattgcctggttgttcgaggcgctgggtattgccgagaagcgggaaacttcggtgtcgaaactctccttcgggcagcagcagcgcgtggctttcattcggatgctttgtcagccggcggatttcatgttgctggacgagccgatgagccacctcgacgagcggaatgctgcggtcatggccggaattcttctggaagaggtgcggacgaacggcacgggggtcatcgtcacctcggtaggcaagcgtttcgagatcgagtacgataaagtcttttcgctatgaaactgatctggcaattactccgtcagcacgtcagcgtgttgcagttggcgggctttctggtgaccaatctggtcggcgtggcgatcgtgcttacggccgtacagctttaccgggatgtgacgcctgcgctccaggtgcccgattcgttcctggacaacgatttcatcattcttaccaaagaggtcgaaggggccggcatcggaaagacctccttcacgcagacggagctggccgaacttgcggagcagcccttcacggaggcgctgggcgagtttacgccggcacgttacagcgtgatgggcgggatttcgttggcggggatcggcatgcggacctacctgtttttcgagagcgtacccgaccgtttcctcgatgtccggagcgacgagtggggtttcgaggaggggagcgagttcgtgccgatcattctgcctcgcaattatctgaatctttataatttcggattcgcttcgacgcgcggattgccgcaggtgagcgaagatctcgtgcggggtattaccctcgatctggatctttcgggacgggggcagttccgaaatctcaaggggcgtgtcgtggctttttccaaccgcctgaatacgatcctcgttccggaggagttcatccgctggtcgaaccgtcggttcgccgataaacctgcggccgatccttcgcggatcattctggaggtgcggaacgctgcggacgaccggatccatgaataccttgcgctccaccgctaccagatcgaaggaggtgccggcgacgaaggccgggcgagctactttctgcgcatggcgacgggagtggtggtcggcgtggggctgttgattaccgtactctccttcttcattctgttgttgagtattttcctgatgctgcaaaagaacctgaagaagctcgaagacctgttgatgctcggctatacgcctgcgcaggtggcacggccctatcagttgctggcgctggggctgaacgtgtcggtgctggcgtgcgccgtgccggtggtcgtttgggtgcggtcgaaatacctcccgatggtacgaatgctcggtgaggattatgcggtgcccgggatctggggaatgcttctggccgggatcgtcgtggtcggggcggtagtgttgatcgatatgctggtgatccgtcataaggtgaacggactttggacacagcggtagcgtcgcgatgcgataatgataaaatagctgtctccaatgttgggttgctattttctttctgttttacgaaaagagagtttggagataataattttcctgaaaatgttgctgttgtgtattttagcgggacgttggaatctcccgattgttttcaaattgagggtgttccactctctgtttataattggtcctttatggaagtccgtcaattcaaatagtatctacttttaaatggtgcaaatagtttcctgtcatgtctgttcgaattatggtcggagaagtgcgttcgcgtagtaatactttttcccgatgggagcaaggattcggcgggagacctgctagttggaatttatgaggcagaggatagaattaacggatatggaagtattgccaattgagaaatggggtatgccgttgctggatcaacgactttcatagatattttttgtctgttgtctatgtctcggttctgcattattccttggcaggtatcgtataaaaaacacagaccagactacgttttgtggattgaatagtttttttataattctggaaagttcttgttagagccttatacaaagggctttgggagaattacccattttttaggtaatgacttggcaacagtgctatatactgcgttctaccttgaattgctttcaagtaactcgtttgaatacaaatgtacgaaaaatattggaagctataacacaaaaagagaaaaaagctagtacccttttgtaagtaccagctttttctctttaaatattatccaagttctagatttctttagttgcatgaataatacgtacgtttcctctaaaggaaatggacgtattataaagacagatgcgttttatttatagtcgattgcatccggattgtcgattaccagtgtggaaatcgattgtccttcagccagccacagtttggtcagtggattgccttgacagtaaagggtctccagattcaaattgttgctgacatccagagttgtcaacgtgttgtctctgcaatttaactcggtcattgcgggctgtcctgtgacgtccagctcggaaaaattcgcattgttgcagtttaatgtctcaatttttgtacaatcggtcaggttcaatttcgtcagaaaagtattgccacaatcaatctttcggagttctgtccggctcgagaggtcgagttctccttccaagctattttggctgcaattgatcgatgtaagattctggcaggtctctatttttagggttttaagcagattgttctggcagtgcagtgtcgcaattttcgaattggttgtcagatcgagtgtcgtaagactattggcataacattctaagaaactcatttccggcaacttcgatgtatcaagtgttgtaagattgttgttgtaacatcccagtgaagtcaatttttctaatccggagaggtccaatgccgccaatttgtttgaaccgcagttcacaattagcatttcagaacagttggatatatttaaagtcgtaagttaattttgacttacgtcaagataaacgagcttcgacattccgctcacatcgcaagccgtcagtttgttcttgtaggcctgtaccagctgcaagttggcacattccttcaggttgagtgctccgatttcgttcacattagcgtaaagctgtttgagcgagatgcatcccgaaaggtttgctgtcttgatgaggttataagaacaatctacgtattcgagtttgtccaacccacttaaatcgagggaggtgatggcattgaagtcgcattccagattgattaggtttttgcagtattcgattcctttcaacgacgtgatcggcactgcttcttcgtcctcctcgtcaaatccgagatagagttccgtcacacgcaatgcttcttcaggagaaattgcaccatcatagtcttggtcatagtaagagagcataaaattcttgaaagtgctgtcgtcgaagactaccatgccctcgggagtctcgctgggcgaagcctgtgaaacggggatatcctgtcttgcggcgatatcgcccgattcggagatgacatagaccgtcagcgtacccgtacgcgtctcattgccggaataagcttttgctgttgcggaaaatcccgtctccgtgcgttcgatttccagccacgagatattatccgtatactcccaatagggaccgttcgttgtgacggttacctccactgtttgttttgtactctggaattccagtttgtcaggtgttacgctcaaagagtaaatctcttttccttcgtctccggttggtcccgtcttctctccttcgtcgtcgttacaacccggagccaacagcagagtaaatccggcgcaaacaaatgtaagtaaatgaaaaaaaagtttcttcatgttcgtgtataataatatttttatttgttttttgtcttcggaattcctgcaaacttgcaggaattccgaaagcaaataagataaattcagaatttataattgttaattgtaggtttttacgcaacgaacgggattgccgtagccccaagagtcgtccgtcgactcgttatccaacagaggccacgaaacaaagaaaacccaagcacgttgattgacagataattcactgctccagatattgaccagaccatcctcttcggccacatagcgcaatgcgcctttatccgaaggatgtgcacttcggtgcccttggaacggaaaccaggtttcttctcctgcatcggttgtatatctcactccctcattggggaatcgatccgcacgattctgaaccttgctgaacacacccttgcgaggagtctggtagccgggaggacagggatcgtaattgcttttcgagaaaggacgccataatgacttgtccgttacgtatttccagtcttcttcggtgtttgccggatccagccagttcgcctggctgttaacctgatcgccgtatatgaaaagcatcggctggcaaatcgcatgcttaacggagccgatctctgttgtgcattccgctgctacccattttgcctgactgtaggtagggttgcatacggtcagttcactgctgttttcgaaagcgaccgtctcgtttgctttgccgccgataaatgggtctttacggccccactggtagagaagaccataggattcctgacctttggtgtccgttgcacctaagttgcggtccataacgtagaatccgtcggtttttccgccgctctggtagatggggttgttctcgtagtcgaacgtctccggcagatccgtcatccagatgtgccaggaccatacgatttctcccttatcgtcgaatgctgcgatcagggcgttgcctctgtttgcagttgctgtgaatgagatcataccgtcggcgtaggagatgtctgaaatgagttcgttgttttcggaagcacccacgcgcgacacccaaagccaatcggctttcgcgatattctgaatcggagtgttgtctattctgcgtgtccgaaaagagtaggttcccgctgtgtgcaccatgtagcagtttgctacgccgtaagcgctcaaatcgttctctccaccctgtcctccgggccattcgatttcacccaaagaggcgatttcgttgcgattgaccgtcgttcctggcagttcaaaggtggatacaaggccgatattgtctgttagtataaggtcgaagccttcgctgtagtcgcctgcaggcagtacgaaactgaagtcgtgtcccgactcgatggaaacgcccgattttccgcaattgacggtgatcgatttcgaggcgtcggcattgagagagagtgcgaaatccgatgccgtcatgttgatcatgccgtcgccggccagacgtcggttgttcttgccttgcaattcaatcgtgcgcactgcatgtggacccgaaacggtcagcttgacaacacctgcgacatagcggaagtttaggtctgtggacgtggaagttgctgcggccgggttgagggttgtcagggatgcgccgtattcctgttttgccggaatgttcacgcgcatctgcgttccgcttatgccgtcgatcgaagcattggatgtcgatgcatagtatgaatcggcttggaggcaggggccgaattctccgtcggccgttccttcgccacggtacaatataatgggttctccattaacgtatatggaggagccggagttccagatgaagtcggaaccgtcagccgctttctcgactttggctttcagataaactacctgctccgttcccggttcataggtaacatctgtcgaaacggtttctcccgaaggtatgtcgattgcagggagtttctcattgagcatcacgccatttttcgtatcgtatattgttaccgcgaatcctccgtaggaagctgcgggcaataatacatctacaggggttccagcttctttcaattcaataccctgactacccaaatcgacggtcagcgttgaagatgcttcactggtccattcgatcataggggtatcctcataagccagatcaacggaaaactttccagtgagattgctgcctgaagttgcggtcagtactatttttgtgatttttgtaccgttgtcacccgaaatatttaggcggagagatcccagcagatttttgaatgaaagggcgggggtgacgcttgatgcaaccatggggcgggccatatccgccgaaacattctgtgtcgaggtaaattccgacgagagtatgttttcctcactgtgccggtacctgtgtcgtaagcggcgtagtagtgttcggccctgggtaccttgatggtggctgctgcactgccgactccttcttcaacggtatatttcattccgttgatcagaacctcatctccggattcccaaagcctctcgttttccaatgttgcgatcagagataccgtttcgtcctcctcgggagttggagcaggatccgaatcggagcaggaagtgcagcacatcaggagtgccgccaaactccataaataagtgaaattaaatttcatacttaacatttttaagttagaaaaagtaataagtgttagagatttcattacaaatatagacttttttgaaaaaatattaattttttcaaaaaaaatcttaaaattgcaggaaataaaaacgattcggcgcaaatcgcaatccgaaccggaataacaattaatcgtttaattctaaaagcaacaatgtatgatgaagattactgacctgtcgaaatgcaagaatttctactgcccgcccgaggtgcagttcattgaattgcgaatcgaacgcggatttgccgaaagcagttattccgccacagaaacctggccaggtgaaaatttggaaaccgatgactacggagaattttaattaaatgcactaatatgaaaaaatatcgttttattatatgtggccttgtagtttgggggttgtgctctctgtcaagttcttgtacgaaagattcttcgacggaaccccccttctcagggaaaaccgtgacactcaccgtaacagcggaaaaagagactacccggacttatgttgatgagaataacaaaattcattggagcgaaacgggcgaacggataggcgtcttctatgctaaagagtctgatgcgggtgttctccgttatgcaaccactgccgacgactatacggtgaaagataacggggcagctgtattctctctgatggctgacagcgagtatgcgggttatttctgggcgttctatccgggaatggaaacttcggcgggaataacgctcacggaggtcccacttgtcattccggcacagcagacgccgaccgaaacgagtttcgacccgcaggctgatctgttgattagcaaatatgtcgtaacagccgttgataatacggtcaatttttcgttccatcgtgtcgttgccttcgcaaaaatgaggctgcaaggggtcgctcccggcgaaaagatctcctcgatcactcttgtcgctccgggcacgaaattggccggcagctgcacggctaatctgctcaacggttcggtgaactacgctccggcggatgattccgctgcggagacgcttactttggctatgaacggtcgtgaggcttcaggtgaagatttggtgtggttttctgttatgccggccgatcttagtggtaaaaagttgacggtagaggttgtaaccgagaccaatatctatcggaaagaaatagattttaccaataaaaccttgaaattcgaggcagctcgtgtgtctgaattcatcatttccggtttgacacctgttaaacgcgacgtttacaagttgatgacacggacttcagagttgaaatttggcgataagatcgttattggtaggaataatttctctggagaaaccagattgatgagtaagaataaattttcaacatctttggagcctcgctggtatgcgtctacggatgaactggtcgttgtagatgagagtttgcaaatcatggatttatcttccgatacacaaattattacacttaaagaagggtatgaccggacgacattttctatggaaacggcggaggggtatctgaatgctggggtgaatactgaagatgaattgatgatggatgtgcagtccgatgtaactaaggctgcttcttggacaatctcatgtgatggagggattgcgcgtatttattcggcagacaagactacgcgtgcactcagtggtagtagcagtacgagttatttcaacttgaccacctcgcctggtaatgtctatatctattattgttcgatgggaggctcttcagctcccttgaccgcactacccacgccgaccgggctttcggcaacggcatctggtaaaaccgtgacggtcgcttggaatccggtcgacggagcggcttcgtacgacgtaacttgcgggacggaggtgaaacaaggtgtattggaggcgactgttgaatttgaaatggcggaatacgcagtgcaatacaatgtttcggtaattgccaatcctgccgatcccgaaacgaatacgagttctttggccgcgacgacgaccgtaagcaccgaggctgatcccaatgcgggacaagtggcaaatacggccctgtttgacttcgcaacgatggcagcaagcccggagaaaccggactctccggatggagtcatgacggaagacggctgtcttatgatactgaccagaggatcttggcaatcggaaggtttgggagtattcctcggctctggcaaaacaataagcatcgaagggcagaatggaaagcagatcacccaaattgttatgacgcccggtacaggcaaggatatcaagataggctcttggagcacagatctgtacgagggcatttacgatgaaagcagttatacttggaaacaaggggaggggcctgccagatatgttgagtttgagacatcagcagcatctacgattgcccgaatcgaagtgacctatgaataacaggaaggtcgagggagatagattttttaatttaggcatctacatataactttataccaagaatttagagatagaaaaatccccttgttgtgacttatttacagcaaggggattacataattatttagttcaacgaaataagattgatgtttttattttcgttttttgcaacattatcgataacaacttcatcttttctgtgatagtcccaacaacattggcgctgtccgaatatctgaaaccggcgaatatgatattagggctttctgaatttgccgaaatgtcttgtatcttatattctaaaacttgaaattgagactcttgataatctttcattgctattttagagaaagttgtgttttgtaagaataccatgctttgcttgtacgtagattgtcaatagatatttgtctttccaatacgatgcacttttctccgtcaaattctaaatttccatttgtcaccattgtattgcgtgcataatgatgtagaaattcccaataagtattatcattcggtattgtacaaatttccctttctttcaactcattgttgccgatagtttcatacttgataatctctttgtctcgaacagaatataaatcactgttgaaaacaaaggtataaaagtatctgtaatcaatatcgcttttacgccattttctggatgattttggcccgtaaaatcgtatttcgatagtgtttttggcatattacaggcatttgtctcttattcaacagaagcgctgcccctctccacacctttgtcacatccgggaagagccacgagctgtttattgaaaccgacatagtctcgcgctctttgggacccctccgtgtagtacatgtgtattttgctgttggatttcataattatttgtattatggtgtatttatttgttttttactgtttgatattttgccctttccatatacggagcctcgaccgtggcgatgatactccaatctacacccgtgatttggaccgcgatccggtcgaaagtcgtcttcgggggaagatttcggatgtcggtaattaccagcggataagttttcggcttcggtttcggttcgggcaacggggtcgtgggatcccgtgccccttcattttcctgggtgtcgttgcatccggctgtcaggagtaccggggccagcagtgcgagtaatagggagcagaggcttatttttcggtgcgggatgattctggttatcataggtgtaggtctttcttggttgtctgaagcggcggttcgtgcggatttcggtcagccgggttctgtgcggtgccgattccgggagtaaccataaggcataccatcggaagtgtcggcgatatagatggcttatggctcttgcagatcggcgaaccagtaggtgtaggttttctccgtgccgtcgtcgagacgtatgtcgtaacttcgggagaaaggactccccagccggaaccggacgggcgtgcggaaaatcgggccgtcgtaacagaaggtgtggtattctccgttttcgccgttgggatccgtccccgcaggcagggaggcgatgaaatcggagtcgatggtccgcccgatggctgcggctcccagtccgtcggccatggtcgttactacgacggtttgcaggcccgaggccaggaaatcgtgcatcacggtttcggagctgcggccccaaaggggttcgacgacttcgatgccgtgcggagcgagttgctgttcccggtatttgcgaacgtcgtgcaggaagatgtcgccgaagatgaagtgcgttacaccttgtgctttgaaatgcgcgacggcttgcgacatagctgtctgataatcctccatatcgcctttgggcgtgagatcaaccgcatggaggggaatgccgatgcttgcggcctgtgcctgtaaaaggggaaaagggatcccgtgcatggtcgagcgtcgggtgtcgtgattgacggtcgtcagcagggcgacgatttcgtagtgctgcgattcgatggcatgccacagtgcatgggcggaatccttgccgccgctccagttaaaaacagccttcgtacgttccatacggcaaaattagtcgatcggaggagatttcgtgtatcttttagggataaatcggagtgtgtgataatgattgtcatgataaaatgatgaatttcaccgtcttttggagattctcccaagacgatatttgaataggacgtgccgtgaaatactgctttgtaccgttttcatataaattttctgcagagggacgtcgatttgcgctttcggtttggttgtggtatggacttatttgcgactttttctgcgttccggataaaaaagtccgtgcaactattttttaattcccgaaagagtgctatatttgcacccgatttcgcgttcgatttcgatcgccgagaacgttctttgagaggagtgataaaataaaatgatcaaatttttggttgttaattttattttccctacttttgcaatccaaattggtctatatgccgatgtagctcagttggccagagcagctgatttgtaatcagctggtcgggggttcgaatccctccatcggctccaaaaaaccttgcggagccgacacggtggagttgagcgaaagcggtttagaaacataagggaagttaccagagtggccaaatggggcagactgtaaatctgctggcttacgccttcggtggttcgaatccatcacttcccactcaaaaagagcgccgaacgggttgcctgtatttccgagtcgatcgggaaggggaaactccttgcggtgcgtttttgcggaagtagctcagttgatagagcattagccttccaagctaagggtcgcgagtttgagcctcgtcttccgctccagaaatgcagttgacgcgtgatgcaaacctctttgaggagaggtattgcgtcgctcgtcactcttgcgaaacgacagacgttttgaagagcagaatttttataaaatcttaatacttttatactatggcaaaagaaaaattcgaccgttccaaaccgcatgtgaacatcggtactatcggtcacgttgatcacggtaagacgactcttactgcagcgatcaccaccgttctggctaaaaaaggcctttctgagcttcgttcgttcgattctatcgacaacgctcccgaggagaaagagcgtggtattacgatcaacacttcgcacgttgagtaccagactgcaaatcgtcactatgcacacgttgactgcccgggtcacgccgactatgtgaagaacatggttaccggtgccgcacagatggacggtgcgattctggttgttgccgcaaccgacggtccgatgcctcagaccaacgagcacgtgctgctggctcgccaggtgaacgtaccgaagatcgttgtgttcctgaacaaatgcgatatggtggacgatcccgagatgctcgacctggtcgagatggaggttcgtgatctgctgagcaaatacgactacgatggcgacaacgctcctatcatccgtggttccgcactgggtggtctgaacggcgaggctaagtgggaagacaagatcatggagctgatggatgcggttgataactatattccgattccgcagcgcgagaacgagaagccgttcctgatgcctgtcgaggacgtattctcgatcaccggccgtggtaccgtggttacgggccgtatcgaaaccggtgttatccacgtaggtgatcccgttgagatcatcggtctggaggagaagacgctgacttcgacttgtacgggtgtggagatgttccgcaagttgctcgatgagggcgaggccggtgacaacgtaggtctgctgctccgcggtatcgacaagaaagaggttaagcgcggtatggttgtcgctaaaccgggttctatcactccgcacaccaagttccaggctgaggtttatatcctgaagaaggaagaggggggccgtcacacgccgttccacaacaaataccgtccccagttctatctgcgtacgatggacgtaaccggtgaggttactcttcccgaaggcgtagatatggtgatgccgggcgaccacgtaacgatcaccgttgagttgatctacccggttgcactcaacgaaggtctgcgtttcgcaatccgcgagggtggccgtacggtaggtgcaggtcagattctgaagattctcgcctaatcccagggatatttcagtagtgcagggattgacttgcactactttttaggagcatagttcaagggtagaatagcggtctccaaaaccgttgatgggagttcgaatctctctgctcctgctaaaataaagtaagaagaatatgttcaattacgtaaaagaatcttataacgaattggttcataaagtgacctggccgacgttcgcacagttgcagaactcgacggtagtggtgatggtcgcttcgttgatcttcgccatcgtgattttggcgatggacatttcgtttgagaacattatggaggctatctacaggaccctggctaagctcggtcgttaattgtttttgtgaccatgagcgaaacagcgaaacagtggtatgtagttcgtacgatcggaggcaaggagaataaggtaaaagagtacatcgaatccgaaatccgccacagccacctggaagagtatatttcgcaggtgctgattccgaccgaaaaagtctatacgatccgtaacggtaagaaggtttccaaagagaaggtttcttatccgggatatgtattgattgaagccgcctttgtcggtcagatccctattatcattcgtaatattcccaacgtgctcggttttttgggtgacaccaaggaggacagccgcaagatgatcgctacgcccctgcgtccgcaggaggtcagccgcatcctggggcgtgtcgatgaattgagttcgatggaggaagaaaacgaaataccattctttgtcggcgaaaccatcaaagttacagatggtcctttttcaagcttccaaggtaccattgaggccgtcgacaacgagcgcaagaaactcacggtatcggtgaagatattcgggcgcaaaactcctatggagttgagtttcacacaagttgaaaaagaataattaaccaaggaaaactatggcaaaagaggttgctgcatttatcaaattgcagatcaaaggtggtgctgccaatccttctcccccggtgggaccagcattgggttcaaaaggagtcaatattatggacttctgcaagcagttcaatgccagaacacaagacaaggcgggaaaagttcttccggtcatcatcacggtttacagcgacaagtcgtttgacttcatcgtaaaacagccgcctgtagccattcaactcaaggaggcagccaaagctaaatcgggttccgcacagcccaaccgcgacaaggtcggtcaggtgacgtgggatcaggtgcgtgagatcgctcaggacaagatgtccgatatgaactgtttcacgatcgaggctgctatgcgtatgatcgctggtactgcgcgcagtatgggtatcaacgtcgttggagaatttcctaacaagtaattgcaattacaagaatgagtaagttgacaaaaaatcaaaaaattgcctacgcgaaggtcgagcccgaaaaggcttacaagcttacggaggccgcagctcttctgaaggagattacttttacgaaatttgatgcttcggtggatgttgatgtgcgtctgggcgtggatccgcgtaaggccaaccagatggtgagaggcgttgtgactcttcctcatggtacgggtaagcaggtacgggttctcgtgctctgtactccggaaaaagaggccgaagcgcaggctgccggtgccgactacgtaggtttggatgaatacgtcgagaagatcaagtccggttggacggatatcgatgtgatcatctgtacgccgaacgtgatgggtaaggtgggggcgctgggtcgtattctgggtccccgcggcctgatgccgaaccccaagaccggcacggttacgatggaagttggaaaggctgtaagtgaggtaaaatcgggtaagatcgacttcaaagtggacaagttcggtattatccacacttcagttggtaagatttcgttctctgcggagcagattgccgataacgtgaatacggtgctcagcatgattatgaaattgaaaccggctgcagcgaaaggttcttatgttaagagtattttcctctcgacgactatgagccctggcttgcagatcgatgctaaatcagtagaaactaaataagagggaggatttaagagatgacgaaggaagaaaaattggttgtcattgacagcctcgccgagcagctcaacgagtatcctcacttttacattacgaacatcgaggctttgaatgctgagcagactgcgtcgttgcgtcgcaagtgcttcgaaagcgacatcaagctggtggtcgtaaagaacacgcttcttgccaaagcgctggagcgggtggagaaagcggatgctgatttggtgaaagtattggagggttcgacctcggtaatgttcgcccacacgggcaagacgcctgcggtgctgatcaaggagttccgcaagacttccgacaagccggtactgaaagcggcgtacgtggaaggctgcgtgtatgtaggcgacaaccagttggacactctgtgcaacattaagagccgggaggagcttatcggcgatatcatcgccctgctgcaatctcctgcgaagaatgttatctctgcattgcagtctaatgcaggccaaaagattgcgggtatcgtaaagacgctcgaagaaagaaattaacaaacaagaattcaaacaaaatttaataagattgaacttatggcagatgtaaaaaaattagctgaagaattggtaaatttgacagttaaggaggtaaacgagttggctacgatcctcaaagaggagtacggcattgaacccgcagctgcagccgttgctgttgcagcgcctgctgccgccgccggagaggctgctgccgctgagaagagcgcattcgacgtgattctgaagaacgctggccagtcgaagctccaggttatcaaagttgtgaaggatatcgcaggcctgtcgctgggcgatgccaaggctttggttgatgctgctccgaaagcaatcaaggagggtgtttccaaggaggaggccgagtcgatcaaggctcagctcgaagaggcaggtgctgaagttgaggttaagtagtttctacttaaaagtttcaggacaaactcagggtatagggcttacgctgctgtaagctctatgccttttctggtctaaagattagaagtgccgacaggagctgtgtctggtctttggaagtttggatgctctcagggtgtaatctgtttacactgggggcattagcgggattagaagaggtccgctgcgggggcttcccccggaatacttaaaccttcaactttaatttggattttaccgatgtccacgacaaaaacacaacaaagagttagcttttcgacagtcaagaaccgggtgccttatcccgacttgctggaggtacagcttaaatcgttccgggattttttccagatggacaccacggccgagaatcgtaagaacgaggggctgtataaggtgtttcaggagaattttcccattaccgataccagaaacaatttcgttctggagttcatcgactactatatcgacccgccccgctattcgatcgaagagtgtctggaacgcggcctgacttatagtgttcccttaaaagccaaattgaaactatattgtaccgatgacgagcacgaagatttcggcgtggtcgtgcaggatgtctatttcggtacgattccctatatgaccgaacgtggtacgttcgtcatcaacggtgccgagcgcgtcatcgtttcgcagctccaccgctcgccgggcgtgttcttcggacagagcatgcacaccaacggtacgaagctctattcagctcgtatcatcccgttcaagggatcgtggatcgagttcgctaccgacatcaacaacgtgatgtacgcgtacatcgaccgtaagaaaaagttgcccgttacgaccctgctgcgtgccatcggtttcgaagccgatcagcagatcctcgagattttcgatctcgcggacgaagtgaaagtgaccaaagccgctctgaagaaggccgtcggccgcaagttggccgccagggttctttcgacctgggtcgaggatttcgtggacgaggatacgggcgaggtggtttcgatcgaacgtaacaacgtgatcgttgaccgagaaacggtgctccaggaagagcatatcgaccagattatcgagagcggtgccaagacgattctgctgcataaggagaatctgtcgggtatcgatttctctattatatacaatactttacagaaagatccgtgtaactccgaaaaagaagccgtggtgtatatctatcgccagttgcgtgcttcggagccgcccgacgaggctacggcccgcgacgtgatcgagaagctcttcttctcggacaagcgttacgacctgggcgatgtcggccgttatcggatcaacaagaagctcgatttggacatcgatccggcgatccgcacgctgacgcgcgaggacatcatcgccatcatcaagtacctgatccagctcatcaactcgaaagccgaggtggacgatatcgaccacctctcgaaccgtcgtgtccgcacggtgggcgagcagctttccaaccagttctcggtaggtttcgtgcgcatggcgcgtaccatccgcgagcgtatgaacgtgcgtgacaacgaagtcttcacgccggtggatctgatcaacgccaagacgctctcttcggtgatcaattcgttcttcggcacttcgcagctttcgcagttcatggaccagatcaacccgctggccgaaatcacgcacaagcgtcgtctgtcggccctcggtcccggcggtctttcgcgtgaccgtgccggtttcgaagtccgcgacgtgcactacacgcactacggccgtctttgcccgatcgagtctcccgaaggcccgaacatcggtctgatttcgtcgctctgcgtctatgccaagatctccgacatgggattcatcgagactccttaccgtaccgtgaccaacggacaggtggatctcaacaatgccgatatcaaatattattcggccgaagaggaggaggggcaggtggtcgcccagtcgaatgttccgatcgacgacgagggccatttcctgcagcccgaccgcatcaaggcccgtgaaggcgccgatttccccgttgtgacggcccaggaggtgacgctcatggacgtagctccgaaccagatcgcgtcgatcgcggcgagcctgattcccttcctggagcacgacgatgcgaaccgtgccctcatgggatcgaacatgatgcgccaggccgtgccgctggtgacctgcgagtcgccgatcgtcggtacgggtatcgaaaaggatatgatctccgacagtcgcatccagatcatcgccgagggcgacggtgaggtggtatttgcggatgcaaccaagattcagatcaaataccagcggacggaagaggaggtgatctgctcgttcgagccggaaattacgacttatgaactgcctcgctaccgtcgtacgaaccagaatacgtcgatcacgttgaaaccggccgttctgacgggtgacaaggtgaccaaaggccagatcctgaccgaaggttattcgacgcagaagggcgagttggcgttggggcgtaacctgaaggtggctttcatgccttggaagggttacaacttcgaggatgccatcgtgatttcggagcgtatccagcgcgaggacattttcacttcggtccatgtcgatgagtacatcatggaggtccgcgacaccaagcgcggcgtcgaggagctgacctcggatattccgaacgtgagcgaggacgctaccaaggatctggatgccaacggtattatccgtataggtgctaacgtgcatccgggggacatcctgatcggtaagatcactccgaaaggcgagagcgatccttcgcccgaggagaagctgctccgtgcgatcttcggcgacaaggccggcgacgtgaaggacgcttcgctcaaggcgcagccgtcgttgcacggtgtggtgatcgacacgaagctttacagccgtgccggcaaggagaacaagcgtgcgggaaagagctcggagaagctgcagattgagaagctcgacgagaagttcgcagcccaggtcgccgacctgaccaagcagctcgtaaacaaactttatacgctgcttcagggcaagacgactacgggtatcaccgattacttcggtgtggaactctatcctgccggaacgaaattcacccagaagctgctcgatgagctctcccgcaaagtcaccgacgagaagtcgggcgttgcaatggggtacctgaacctggggacctgcaagtggacgggcgacagccacctcgatgcgctggtagagaagacgatcaacaactatacgatcgaatggaagaaggccgatgccgcgatcaagcgtgagaaatacaacctcaccaacggcgacgaacttccccagacgggcgtgatccagatggccaaggtctatatcgccaagaagcgcaagctgaaggtgggcgacaagatggcgggacgccacggcaacaagggtatcgtggcccgtgtcgtgcgcgacgaggatatgccgttcctcgaggacggtacgatcgtcgatatctgcctgaacccgctgggtgtgccttcgcgtatgaacctcggtcagatttacgaaaccgtgctcggctgggccggcaaggagctgggactgaagttcgcgacgcctattttcgacggtgcttcgctcgaccagatcaatgaatatacggcgaaggcgggtattccgcgcagcggacgtacttacctgtacgacggcggtacgggcgagaagttcgaccagccggctacggtgggtgtgatctacatgctcaagctcggccacatgatcgacgacaagatgcacgcccgttcgatcggtccctattcgcttatcacgcagcagccgctcggcggtaaggcgcagttcggcggtcagcgtttcggtgagatggaggtttgggcgctcgaaggattcggcgccgccaatatcctgcaggagatcctgaccatcaagtcggatgacgtgatgggtcgtgccaaggcttacgaggccatcgtcaaaggcgacaacctgcccaagccgggtattcccgaggcaatgaacgtgttgctgcacgagttgcgcggtctggccctttcggtcaagctggagtaagggaaggtaggtagtagtatatagaggataagaaaaaagcattgcattatgtcattcaataaagacaataaagtgaataacggttacagctccatttcgatcggactggcttcgccggaagagattctggcgcagtcgagcggcgaggtgctgaagcccgaaaccattaactatcgtacctacaagcctgaacgcgacggtcttttctgcgagcgtatcttcggtcccgtgaaagactacgagtgccattgcggcaagtacaagcgtatccgttacaagggcatcgtctgcgaccgttgcggcgtggaggtgaccgagaaaaaggtgcgccgcgagcgcatgggccacatttcgctggtggtgccggtggtgcatatctggtatttccgctccctgccctcgaagatcggctatctgctgggtatcccttccaagaagctggaggcgatcatctattacgagcgctatgtggtaatcaacgccggtgctgccgccgagcagggtgtggaacggttgcagaccctttcggagaaagagtatctggacatcgtgggcgcgctgccgaagggcaaccagtcgctcgatgacagcgatcccaacaagttcgtggcccagatgggtgccgaggcgatctatacgttgcttcagcaggtcgatctggattccatgtcctatgccctgcgtcacaaggcttcgacggaaacctcgcagcagcgcaagagcgaggcgctcaaatgcctgaatgtgatcgagatgttccgtgcttcggaaggccggaacaaacccgagtggatggtgctgaaggtgctgccggtgattcctcccgagctgcgcccgctggtgccgctggacggcggacgtttcgctacgtcggatctgaacgacctctaccgtcgcgtcatcatccgtaacaaccgtctgaagcgtctgatcgagatcaaggctccggaggtgattctgcgcaacgagaaacgtatgttgcaggaggcggtcgattcgctgttcgacaactcgcgcaagagcaacgccgtgaagaacgaaagcaaccgtgccctcaagtcgctgtccgactcgctcaagggcaagcagggtcgcttccgtcagaacctgttgggtaagcgtgtcgattattcggcccgttcggtcatcgtcgtcggtcctgaactgaagatgcacgagatgggtattccgaaggatatggcggccgaactctacaagccgttcgtaatccgcaaactcatcgagcgcggtatcgtcaagacggtgaaatcggccaagaagatcatcgaccggaaagaccccgttatctggggtattctggagaacgtcatcaaggggcatccggtgctgatgaaccgtgccccgacgttgcaccgtctgggtatccaggcctttcagcccaaattgatcgagggcaaggccatgcagctgcacccgttggcttgtacggcgttcaacgccgacttcgacggtgaccagatggccgtgcacctgccgctgggcaatgccgccattctggaggcccagctgctcatgctcggttcgcacaacgtcctgaaccccgcgaacggcgctcctatcaccgtgccttcgcaggacatggttctcggtctgtactatatcaccaagccccgcaagggcgtcaaaggcgaaggccttactttctatggtcccgaggaggcgatcatcgcttacaacgagaagcgggccgatctgcatgcgcaggtgaaatgtatggtcagcgacgtggacgagaacggcaacaaggtgcgggtactgaaggaaacgactatcggccgcatcctgttcaaccaggtggtgcccgaagaggtcggttatatcaatgaggtgcttaccaagcgttcgctgcgcgacattatcgccgtggtgatgaagaaggcgggtgccgacaaggtggctgcattcctcgacgatatcaaggcgatggggtaccagatggccttccagggcggtctgtcgttcaacctcgatgccgttatcattcccgaggagaaggagaaattggtccaggagggatacgagcgtgccgacgaggtgatcgaatcctacaacatgggtcttatcaccaacaacgaacgctacaaccagatcatcgacatctggaccaatatcaatacgaaactcaccaagacggtgatcgacaccctgatcaaggatgacgacggtttcaacccggtctatatgatgctggactccggagcccgcggttcgaaggagcagatccgtcagctttcgggtatgcgcggtctgatggccaagccgcagaagtctggtgtcgagggcggtcagcaagttatcgaaaacccgattctctcgaacttcaaggagggtctttcggtgctcgaatacttcatctctacgcacggtgcccgtaagggtttggccgatacggcgctgaaaacggccgatgccggttacctgacgcgccgtctggtggacgttgcgcaggatgtaatcatcaacgaggaggattgcggtacgctgcgcggtttgacggctacggccatcaagcgcaacgacgacgtggtgcagacgctctacgatcgcatcctgggccgcacggctctgaacgatgtgattcacccgctcacgggcgaggtgctctgcaaggccggtgaggagatcacggagtcgattgccgaggccatcgagaaatcgccgctggagtccgtcgaaatccgttcggtgcttacctgcgaatcgcgtcgcggcgtttgtgcgaagtgctacggacgcaacctggctacggcccgcatggtacagcgtggcgaagtggttggcgtcatcgcggcacagtccatcggtgagccgggtacgcagctgaccctccgtacgttccacgtcggcggtgtggcggccggtacggctgtcgagaccaatgtggtttcgaaatacgaaggtcgtctggagatcgacgagcttcgcaccgtgaagggcaagaacccgcagggcgaagccgtggacatcgtcatttcgcgtcagtcggagttccgcatcgtggatcccaagaccgaaatcgtgctttatacgcacaacctgccttacggttcgatgctctatatgagcgacggtgccgaagtcaagaagggcgacatgatctgcgagtgggatccgtacaacgcggtaatcatctccgagcatgagggtaaagctgtttatgacagtgttatcgagggtgttacttaccgtgacgagcgcgatgagcagaccggtctttcggagaaggtaatcatcgaatccaaggataagaccaagaaccccgtgatcaaggtgatcaacaaggagggcgaagaggtcaaatcctacaacttgccggtgtcggcccacgtggttgtcaaggacaatgcgaagatcaaggccggcgatatcctgatcaagatcccgcgtgccgtcggcaagtcgggcggcgatatcaccggtggtctgccgcgtgttacggagttgttcgaggcccgcaacccgtccaatccggccatcgtttcggagatcgacggcgaggtgaccttcggcaagatcaagcgcggtaaccgtgagatcatcatcacgtcaaaagaaggtgacgtacgccgttacctggtgccgctgtcgcgtcagatcatcgttcaggagaacgactacgtgaaggccggcggtgcgctttcggacggtgccattaccccgagcgatattctcaatatcctgggtctgacgaaggtgcaggagtacatcgtcaatgaggtgcaggaggtgtaccgtatgcagggcgtgaagatcaacgacaagcatttcgaggtgatcgtacgccagatgatgtcgaaagtcaagatcgaagatccgggtgatacccgcttcttcgaggatcagatcgtcgataaatgggagtttatggacgtgaacgacgagctttatgacaaggtggtcgtaacggatgccggcgactctacggccgtacagccggggcagattatctcgatgcgcaagttgcgtgatgagaattcgagcctcaagcgtcgtgacctgaatctcgtcaaggagcgtgatatcgttcctgcgacttccacgcagattctgcagggtattacccgtgccgcattgcagacttcgagcttcatttcggccgcttccttccaggagacgaccaaggtgctgaacgaagctgcgatccagggcaaggtcgatccgttggagaacctgaaggagaacgtgatttgcggccacctgattcccggtggtaccggtatgcgggagtacgacaatctggtcgtaggattgaaggaggatctggaggcgattcaggctgccaagtaatagataatttttatcataatcgaacgggagcggacggaaagtctgctcccgttttttatggggttttgtcacctgcttccggaagatggcggacttcgttgcggagttttttggtcgcttcgcagttcaagccatgtcgggcgaataaccgggacaccgaattgttctggctcgtttttgtggctgcaatggaagaaaccggatcgaacgaaactatttcggatgtcgatatgatcggtggtatgccgttgaaagctggctttcgatcggattatatggggagcaatatgcaaacaggacgaccgggtaggtcgtcctgaagagaagatagtagctccaccgcgactcgaacgcgaatttgaagtttaggaaacttccgttctatcccttgaactatggagccttgtaaagctgtccggcttcttcccgaagtcgtttcggccgggaggaatcgttggctttcgatcgggaagcgtgtgtcgtgccggagatcccgataaacagaaacagtgcgtaccgggaaagtacgcactgcaaatatagtgatttttacgggaaatcggggcggttttagaatttcaggttcactccgatagcgaaagtgtgcgccgacagggaatagttgcccgaaaaaggctggatcgccttgtcgtttgccgtggtatgagcctggattttcgcttgctccggggccattccgcctgcgatgagctgcccgtatgtctgtgcatagaccgctttgtaagtgagtgaattgtagtagtcgcacgatcccgtccgctccgggtctgccgaggtgatatatccgtatgccagatcgatcgatacgtttttgcaggggttgatcgtcacgccggccgtgtaggatactttggtcatcgaaggggtttcggggttgaggaaatcgctccgtacggggctttcatctacgtacatacccaggcgtgccgtgacgaatttgcaggcgtggtattggacgccgatacgggtggccaccgtgttcttatagttcttgatgctcgtcggcagatcgtaaaccgatgccccggtcgtcgggtcggtaatatctacgtggagcgatttataggcgctccacaggacgtattggatgtcgaaagccatttcccacttcggggtcggtcggaagcccacgccccaagcgaggttggccggcagcgggagttccgtttcgacgcaagcgctgctcaagtcgggaatcattcccgttgcctggaggacctgcccgatttcgggagaggcatacaggaggttggccgtgccgcttgccactttcatcttcactttcgaacgataggagaaaccaagggtccattccggggtgatgtcccacaggatacctacgtttacgccgatcgcagttttggcgtcgcctttgatccgggcggataccagggagcgatctcctgcctgggtgaacagttcggcgtattgtccctgccctgcggcggtcagcaatccggcgatcgtattgttcgtcgcttcgccgacggggaacatggagcgcgacaggtcgaacgtaccccaggtgatcgtcatgccgacacctaccgagagtttatcccagaatttgtaggagatcgtcggctgcaatgtataggcttgcaggtcgatgctttggatcagatgtgctccgacccagttgtcgccccagttcatagacgagccgtaaggggtataaaatcccaggccgacggccagatttttggtggctttgtagttgaaataggcgtagagcggcgtcgaaatcttgttgtccgagtgggcttggatctgcggattgccccggtagtcgttgttcgacaggtacgttgcattggatttgatgcccgtgatgccgaccgagaaggagaatcgggaggtttggaaggcggttcccgccgggttgaagtagatcgactcggaattgagtttcatacctgttcccacgtgtcccattcccaactgttttgcactcaaggtattgacttggtagccttcggcgcagaccgccgttgcgaacagcagggccgagatcgttagtagcagttgcttcataatcaaagttttagttgataatttgaaaaatatattgatttctgtggtaagtttatgcgctcggacgagtttcggagcgattctcatccatgctttcaaaaatgcttgtcttaaaacggagcaaaagtacgaaaacaaagtcgagtaggaaaatattttgttcgtaatttcttaaaaagtggactaaaatggatataattggtcagaattggattcgattcgaaaataacaggaaagtaaaataccgttgttcgagatcagatttcattgtttcaggacgtttttttgatcgggggacttggaattacccggaggaaagatttggcagaatcgaaaatccgttatacttttgcactcggagagatggcagagtggtcgattgcggcggtcttgaaaaccgttgagctgcgaggctccgggggttcgaatccctctctctccgctgaacgtgctggacagaaatggtcagcaaacggacaaaaagctacaaatcaacgatttgtggctttttttattgcccgaaagtcctgcttccaagacttcaaaagtacggtaaaagacaaagtttcgttactaaatcgttacctattccttaccggacaaaaacggtaacgatttgtcctcaaatgacctgaaaatgacttgattagtccatagtctgcataactcgaaaacgagaggtaaaaattaattttgcaactaaaaaagtgagttatgaaatcgacattcaaggttcttttttatttgaagaaaggttctgaaaagaaaaacggcgaggttatgattatggcacgcatcaccatagacggcaaactttgccagttcagtacgaaacagagcatccagcccgacaactggaacacggctgcgggcaaagccaaaggcagggatgccgggaggataaacgcccttttggacgacatacgttcttccctgaataccatttaccacgaaatgcagcggcgtgacaactacgtgaccgccgagaaagtgaaaaacgagttcttgggacacagcgagagccacgaaacaatcctttcattgttccaaaagcacaatgacgatgtgaagcagcttgtgggcatatccaagacgatagcgacctaccgcaagtatgaagtgacccgccgccacctcgccgggttcatccgcagcaagtacaacgtgtcggacatatccataaaggagataagcccgatgttcattaccgattttgagttatacttgcgcaccgcctgcaagtgcggctacaacaccaccgccaagttcatgcagttcttcaagcgcatcatcatcattgcccgcaacaacggcatactggtgggcgaccctttcgccagctacaaaatccggctggagaaagtggacaggggttatctgacagaggacgagataaaaatcatccttaaaaagaaaatggtttccgaacggctggaacacgtcagggacttgttcgtcttttcctgtttctgcggtctggcttacagcgatgtcgccaacttgcggcaggagaatatccaaaagtcctttgacggcaacctttggataatcaccaagcgggtaaagaccaacacggacgtgaatgtccccctgctggatattcccaagatgattttgaaaaagtacaagggcaagttgccgaatggcaagatacttcccgtaatcagcaatcagaagctaaatgcctacttgaaagagattgccgatatttgcggtattaaaaagaatctgacattccaccttgcccggcacacgttcgccacaaccaccacgctgtcaaagggcgtacccattgaaacggtgtccaagatgctgggacacaccaatatcgaaactacgcaaatttacgcccgcatcaccaacagcaagataggcagcgatatgcaggggcttgacaagaagtttgtcggcatcgagaaaatttacaaggaagcagccatgtaacatggctgctatttcccgaacaacaagtatcacctttcaataaataaatgcgttatggctaagcaatctaaaatagaatacagtaaagaatacctcacaagcgaggaactggcagcgatttcaaaagtgaaactgcccctgtcccggcagcgtaaagcccgtgacattttcctgttctcgtgctacacgggaatggcatacagtgacataaacaggcttagaaaagaaaatatcttggcacattcccgtgaaaaacgttttctgcgctttcatgtgtctaaaagtaccttgctatactcgtttccactgcttgatgcgccttacgacattttgaagaaataccgggggcttcaagaaaacggggagcttctgcccgttttaccactcccggcgataaattacgatttacaaaacgtttgtgccgccgctggcataaaaaaatccgttaccttatcttgcgcccgcaagacatttgcctttgttgtcgctcctgaaaacggcattaccgccagtatgctaacggggatttacaatgaacacaatcggtaacaaaacaggtaacgatttaggtaactatataccacataacaatctatatccaagcattttacattcttccaccttgcgggcagtccaccgactacccgcattttttattcccttttccactggcacattccccgaaacgccagccgtgcgtggcatggctgactgtatttcgtgaaaagagccgttggaaacccgcacaagcgtattgcaagcaagctcacaacacccttgcctttcccgcccgcatggagtgttccctaaaagacgaaagagaacaggcacttttcccctgtttccctaaatgtaaatcttcctctcacgcagtcccccagccgggacagtcgttttaatcatttcaataggcaaaggtagttacgtgttcttcacgattttgaaaggtcgagccgttccggtttggcgaaaaaatcttccctgccttgcgaggtattttttgcccaaaaccttgcaaactctaaacactacccttttaagcctatgtgaaacgaaaacgaccgacccgaccggaagacgcataaaaaaaaagtcggatttacgggaaacaggaaaaaagttcagtgaaacttcaactccctcacctctcaaatccgcataaaattaaaaacttaaaaaattgcagcaatatggaagcaaaggtattatcggaagcaaaagtttatgtaggcacttatgccaagtacaacaacggttcattgtccggcgcatggctcgacctttcggactattcggacaaggaagaattttatgaagcctgccgggaacttcacaaggacgaggaagatgcggaatacatgtttcaggactgggagaacgtgccggagggcttaatcgacgaaagctggatttctgaaaacttcttcgccctgcgtgatgcggtggaggatttgagcgacaccgagcaggaagcctttttcgtgtggtgcaactataaaagccatgatttgggcgaggaagatgcggacgaccttgtacgtgatttccgggatgaatatcaaggggaatatgacgatgaagaagatttcgcctatgaaattgtagaggaatgttacgacctgccggagttcgcaaagacctatttcgattacaaacagtttgcccgtgacctgttcatgtgcgattactggtttgatgacggctttgtgttccgtgcggcataacaaccaatccgggcggggtgtcaaagccctgcccgcttaaaacaaccaagtttataaccataaaaaataagacatcatgcagtcacttaacaaaaacggggtaagcatcacccagacaccgggagaagaaaagttcgtgaaatgccgtttaggggctttcaggggacaaatttattatcaatatgactaccgccacacggacggcgaacttttcagcacggtagccaaaacgctggacgagtgccgccgcaggcgtgacgaatgggtagcgaagaagaacggagtaataaacaagtaaatttcagggacatgaaaacgacagaagtaaacaaggagcttatcggcaggcgttgcgagtgtatttttacgggcttaatggtaacgggcgttatcgaggacacagaagaaaacgaacacaccatagaggtaaaagtccgtttcgaccacccgcaccagtggggcgatgatttgtataatgatgtgtgggcgtgggggcgcaaaattgacgagttcggcacgctgcaccatttgcaactgttggaggacaaaccggactttcagataatgacggtagttttcggcgagccaatcagccggatagaccgcagtgtttttgaagatgtagacacgtggggcgtctgttccctgcaaggctgggtaaacagctatgaaagtgtccggtttgtagccatagacgaccatacggcaaccatcacgggcgaatataacatggagcaggtaaaggtgtggttagagaaatacacgtccataaagagccttaaaaccagttgatagaggacggcggctgcttgccgccgttactttcttccgtgagcctgccagcgggtgaagaaagtaacaaagaagcctttcgttttccctatcatggaaacagcccgccgatgcttcccggcgggctgtctgcccgatatttacgctttgcgtatcattccatacccggtttcccaagaggatgataaaaacggatgtcgcaactataaatcctcatagtgaataaattttacaccaagtatgcacacggtttcttcttcctcgatgtcatatttccatgtccgtttattgacaagcatttccgtttcgcaatcgaaccataccattacgggcgcatcatcttcttcgtccgcccatttgaaaacctgattggacggcgttttccataattcagcactgtcacgttcggaaatacagtccttgtccacaatgatgatgtcacctactgccggaactgtatctgtttccaacgtggtttctatgtaccacgagatgccttctatatccaattctatttttaccatgtcgttttgttattagggggttattgtttccgttccttcttcgctgttgtcattattgaatgatagtgtaagttgctgcatctgcccgaagctgtcgatgatataaatgtcaatcgtctgctggtcggtcgatgccgaggtgtagtagagcctgaacgtttctttctccagcgggtaaaggtcgttgggcaggaacaccgtgccgttatccatttccagctttcctttgccgtccggctggaaataccgtatctgataggtagtcggctggtaatagccgccacgcaccagtcggcagcgtatttcggcggtttccccgactttcagccttttgggtactggcagtgtttcgatgctgaacgggtacgcctgctgaatatccaagttgtcattacaggcggtgacaagcacgagggcggccacgatgtagcagcccatgatgattttatacattacattcttcatatacattattatatagcggtcagttgataatgaatttcagtcccaaagatacctgcgtgtggaacttgcctatgtccgagccgaacaacgcccgttcccttgcgttcaacagcagagccacccggtcggtcaggtaggtttccagttccagcgtcagcgcaccgccgtaaatgaagcagtccttatccagcaaggtagagccgtccggcagcagcttttcgcttcggttgcttgtttcgtacccggcgagagccgacaagcccaatgaaaggaaaaaggtctttcgtctgtccgataggaatttcaggtaatagccgccctctgcggtgaactgttctacgggtatctgcatatccttgtagtcatacttcttgtgcaggtattcgccgccaatcacccagcggttggcgttcttggtgtaaacgctgtacgccgccccgatgtggtaggcgaaatcactgccagcgttccaatgcaccccgtccgtcatgcccgccgtgacctgcaagcctttcatgcccggcaggtatctttgtgcgtgtgcctgaaacgaggtcaggcacagcgcaaagagcatcattataaagatgtgtcttttcattccctatttgatttttagttcgtcaatcacttctgcgttcacgatgtcggcgttttccacccgtatggtctgatgccgcccgccgttcttctcgtagagttccacgaccagcagcttgtcgtcaggaatggtaaacttcggcagggcgtacaccgtgcgcacggtcgatttcccggcaatctctatcacctcgttgtagctgcgtaccgcatccagtaccgtttcctgaatagccgtgcgtttgggcactttcttatcggttatcttaaacctgatgaagtccgtgtcgaaaggcacgttggaactgttctttgtctgcgtgtgcacgtagagcatcccgttataggtgtaaatccccttgattaagaactgtatgccgaaacgcttgctacccaagtggcgcactttccggtcattgttcttgtagatgctctgcattatcagcttcactaatagcgggctttcacccgccagttcccggaaatggatgttcatccgggtatgtgagaagtcggacgtatcttcattctccaagaagtccttcatttcgatgttgagcatttccggttcacgggcgtacttggcgttgaacgaaaagaaactgccgtcctcgcagataacggagaagttcgtttctcccggaaagccctctgtcgtggctttcaccctgattacgttctccgcaccgtccgccttgcccgctatgatgtggttgcttcccaaatcgacatagcggacggcggcggggaagatgatatgcaccgtcttggcaaaggtcacttccacgccgtagggcgtaaccatttggcggtacgggagtttccgggtaatcccccggtacaagtcgttgccagccgcatacttcacggtgtcagcggtttgtgcgtttgccgcacacacgcccagcaagagggcgaacaatccaaaaatctgtttcattgctaattgaaattttaacggttgataaaatggttattgttgtttggcatacagcatgactttatagcctgctttcagcttcactttcacggttcggaacttcttggcgaggtagccggacgttccttgcagcaatccccttgtcacgtccatagccacctgctgcccggcactttgggcaaaggaaatgcttgtacccagcccgcttccgatattcgccatagcttcgttgaacgcttcctgctccatagaggacgggacggaaagccccttttgcccgtccgtgtcgaacacggcgagttccaccgggatgatgttgccagcgtactcaatcgaggacaccagtatgtcgagccgttcgccctgcacctttgccgttcccgccacaagggtattcttcggcacaacgatatttcccgcctgcatgggttcgagcaaccggagtttcaccgcctgcccgtccaccagcgtttggtcttggtgtatgcaggcggctaccgtgttctttcccatagcgtaccccgtgcctaccgccgtgttgaagccgtagtttcgtggctggctgtaagcccggatgaagtcggcatcgctcatgggctgctgcaatcccgaaacggtcgtttcccggatagcctgcaccggaatagccggagtgccgataccgccgccgttctgcccggctgtcggtatttgggcaatctgtcccctttgtccgtcctgcccgttcatatactttgccgccagctcgtaggacttttccaagagtgccatttggtcgtcagccgtaggcgtggcgttctgctgctgtttcagtcggtcggtcagttccgccacctgccgtttcaattcctctttttcctcgtccacagggggcgtttcgtagaacgtgcttaactggcggttgatgtcccggtaagccgcccttgaagaagcaccgccgcccctttgtggcttcggatcttcttccggcagcaggttgatttcctcttgtggttcttccgtatcatcatccagcgtgaaaccgaagtcctgcaaggattgtatcttgtcctgctgtttgcggcttgtcaccgcctgctcgtaagccttttgcttgtcggctataatcccgtcctctgcgggcaggggtatgtcggcattgaagccgcccacgctttccacattcacgtcctctttgccggagggtgcgaatatcaggtacatgcaccctgcaaaggcaaggaacatcagcgggaagactatcattttcctgcgctgctgcacctgctgcggggtaagttcccgtttgggcttattttcctttttcggcttcccgtccgcctgctgtgcggtcgtgccgttctcattcttctgtacgtcttccatattgcggtctgtttaacgggttgatacttttggttgtgtcattgccgtgcaacggcagttgtctgatgtgttctatttgcagcctttgcccgtcccgtttcccgatattgtagattgatgaaacggtgatgtagatagacaagccgccgaaaaagaagaacatcaggaggataaccgccagccttttgcccggcgtaatccgtccgcacattcggcgcaggcggtcgtctgcccagtcctgcaccttttcgatgtaatttcgttttctttccataaggctatcttttaatggtctgcaaatccttgttctcggtaatggtgaacgcttcgatgatgaagccgtgcgggttgttgtcgctccgtgttgcgttaagcaaccggcacgaggtgacaaggcttcgcaccgtcaggctgctttcccggacaatcaactggcgggcatacgtgttcaccttgtaggggtactggtcgaagtcgcacttcacgctgtcaatctccaccgtctgcgtgacgtttccggaaatcacccggttgtagtagcccttttccgccaagtccttgtaatagttgaaagcggtcttgtcggcgagaaacaacgagcgtttgatgttgctttcgatagcccccttttcgggtgataaggtgaagaaaagttcgtggaaacgccgcacgtgcgacttcgcttccacgggtctgttctgtgccatgtcctgcgagagtgccagcatcaggcttttgccgttgtcgaggacgtatatcttctgccgctgcttctcggcgaagctgtacgagttccacacggcaaagcccgtcaccagtgcgcacaggcagatgaataccagcgcaaagagccggatttgccggaaactcgtttcgatgttcgttaatgacttaaattccatatactaaatattgatgttggttatttgagtagtttcccggttactttcccgcttgccgcaccgaccgcagccccggcgattgacccagcccgtgccacgttgcggttataggcagacgtaccgccagccgacactatccagcttgccaccgttggaatggtgaagtagcccacgatgccgataatcataaagattatatacacggtgctgctcccgtccgggatgaaatccgggtctgaaagctgctcgatgtctttttggagcatcagggtttgtatgcgtgccagcacgctgctgaacaagtccgacacgggcagccacaggtaaatggagatatagcgtgaaatccaccgggtcagcgtgctttggaaaccgtcatagacggaaatcgcaaacgccagcggacccagtatgcttaacacgattaggaagaacgtgcgcagcgtgtctataatcagccccgccgcctgaaagagcatttccaataactccctgaaccagtcccggacggacttctttatattataagccgtcctgtccatgtacatgcccgtcatggtcaccatgtcggagggcgaccagcccagttcttccagttgtcggtcaaattcctcgtccgatgcgaggtaagccgtttcggggcttcgcatcagggcttcatattccagtcggtctttctgcgcccggtactcgttcatgtcgaaagtctgcgtttccataagctggttgcaccctttcaccactggcgacaataccgtgttgatagtccccagtacgaaagttggaaaaaacatgatgcacagccccagcgcaaagggacgcaggagcgggtacacgtctatgggttcggcacgtgcgagcgactgccacactttggcggctacatagaacaaagctcccagcccggctatccctttggctacccccgtcatgttgctgcacaagggcatcatttcatcgtacagcacccgcaacacttggtgcaggttgtcaaaatccaccgctgctaataacataggcataccgatttatatgttaccagtagcgttcatccgccgagccgtagagagccagcacccggtcggtgtcgttcttcttcttcgcccgcaggtaggacacggatatgttctttcgggtgtagtagttcacgaggttgcggtagttgagcaggcttttataggcgttgttgattaccgccagtctttcggcatccgtcagcgacatgcccgtcacgttcactacattcttcaagtcctgcaacacgtccgcactttcggagagcagctttgcgtacccggctgaaatggcggtgagttcatccggcgtgtagttcgggtctgccagcatgttctgatagtttcgcacgtagatttcggatatttccgccaccaactcaatggacttcttcaccttgatgccgcccttgacaacatcgtgtaccgctttgagcgcatcgtaatattttttaccctgctggaaaatcttctgcgcttccatgaagccgtccagcgtgttcttggcagtggtggaagtctgcactatctgcttggtggtgttgatgatgccctgcgccaagttgccggggtctgacaccacccactgtgcggatgccttgccgatgaagcaaaggcacaccgccataaggagaattgttcttttcattatcttttgttttcagggtttgtaactcgtttgtattcgccgccgggcatgagcgttatccggtcggtctttttgtcataggtgaactgtatgcggaagcccgtttcgatgaacaggcagccgttccgttctgttaccgggtaagccgtttccagtattctgcccctgacattcgctttccgggtgacggtgtatctgccgcccgtttccgagagtgtgaaagccgggtgtcccctgacgtgtacccaatagccctgcatcctttccagctccttgcttccgctgtcctcgcagcccgccagcaggcaggcggacaatagcgtgtatatcagattgtcaatccatttcatgttcctaatttttaagttgttgatgattggggatttcttttgctttctgcaagccgcttgatagccagttcaaggttgccgtccagcttctcggcaagagcgaacagttccattttttcgctttcctcagtcgtgtacgtgtaatattcttccaatgaaacttccgtggcgtacaccgccgattgtgtgccgcccagcgagaagaaaacttccttgtacttccgtccggggtggttcgccatgttgatagacaatatctgcgaacgctccttgtcggtcagtcccaagaggttctgtatgctgtcgaacttgttcaggtattttcgctggtctaacaatattttgcagtccgagttattgatgatactttctttcacgataggggaagaaataatatcctctacctcttgcgtgactacaatcgcttccccgaaatactttcggacagtcttgtacaaatattttatgtagtccgccatgttcgccgatgcaatcgctttccacgcttcttcaattagtattaacttccttatcccctttaacttgcgcattttgtttataaaggcttccatgatgatgatagtcgttaccgggaataaaatcttgtggtctttgatattgtccaattcaaagacaatgaagcgtttatgcagcaaatccagctccttgtcggagttcagcaggtagtcgtactcaccgccacgatagtacggttcaagcacgttcaggaaattgtcaatgtcaaaatccttttccctgacgttcttctgttcaagctgtcggcggtaatcatcccggacaaactcgtagaacgtgttgaagcagggcgttaccgaacggtctttgcctatcagttcgatataggcactcacggcgtttgacaacgccacttcttccgaccgtttgggggcttcatcatcccgcttccacagggtgagtatcagggtcttgatgctctcttttttctcgatgtcaaataccccgtcctcgacatagaacgggttgaacgctatcgggttctcgttggtgtaggtgaaataaatcccgtcctcgccgtgcgtgcggttgtggataagctgggacagccccaagtaactgttacccgtatcgaccagcagcacgtgcgcaccctgctcgtaacactggcgcaccatgtggttggtgaagaaggacttacccgacccgctcggcccaagtatgaacttgtttctgttggtcgtgatgcctttcttcatgggcaaatccgatatgtcgatgtgcagcgggcgaccgcttaccctgtccaccattttgatgccgaacggcgaaagcgaactcttgtagttcgtttcttccacgaacaggcagagagcctgccccaagaacgtgtagaaactttcctctgcggggaagtcggcttcgttgccgggtatgcccgcccaaaagagcgtgggcgtgtcggtggtgttgtggcgtggcttgcactccattagtgcaagctggcttcccacatcgttgcgtatgcgtttgagttcttcccggtcattgctccatgccatgacgttgcagtggcagcgcaccgagataagccccttgctatgcgcttcgttcaggtactcgtctatccactccttgttcacttggttggcacgggagtagcgggagagcgattgcatattccgggcggtctgctcgaagttcttcaggttttcggcgtggtcgtctatgaagatgaactggttatagacgtggttacacgacaacagtacgcccaccggggcggcaaaacttaacctgcaatcgcttctgtctgtggacagcttctcaaatcggcagtccgtcccgacctttccgggcaaatcttccacgtccgaaagcgtgtgcaggcacagtatatcgtccccgacccgcatttcttccgggtacagcccgatgtctttcaggcaagtagtgtcggtttgcgagagcgagaagtatttctcgatgatgcccgcctttccgtcctgcccggtgatttccgatgccgccagccgggtaagggtgacaaacccgctgtcgttcataatcctttcaaactgcccgaccgcttcgatgaactttgccgccgcttccttgtcggctatctcctgcggtacaatcctgccccggcagagggtggagaagtcgctctgtcggcggcttctctcccttgtcgttttcgtcaggaacaggtagcagtaatggttcaggaacgggcgttcattgaagtgccgttcaaaggagcggcttaaaaaactaagctcgtccctttcggtgtcgggctggtagttctccttgatgaagaagtcctgcttgtgtactatggagtagtcgggcagcaccttgaccgccttgtaccacgccgaatgtatggtttcgtactcggcactggtgacggtgaacagttcgggcagttccaccctgaaagccaccgttatgtccgcatcctttgaaatgatgcagccgttctccaccgccaaaaggggaaatttcctttccagcgtggtagcctttaacatattcctcatgttctttcttcctttcttcttttgtagttgaacagccggggtatcgcctttcggctgataatgaagcgtgggtgtcttttgcgtgcggcagctttcatcagcccgtgcgtgccgtacttggcgttgagccggaacgtctgccacacgagcagcagcgaagccgacacgatgaaaccgatacatagccactggttcacgcctgccatgaacaggacgatgaacaccacgaagacagcgagcaagccgccgcaaaagataaagaggtactggcttttcagccccttgaactccaccggcttcccgatacccctgtttaccggatattcagacattgccgcctttttagaggaagaacgaacgtaggatagtggcggcgacaatcaggaagatgcacgccccgaaccaactggcggcggtctttgaggtgtcggggtcgccgcttgaaaacttgttatatacttttaccccgccaatcaagccgcagaccgccccgattgcgtacaccagttttgttccggggtcaaaatacccggtgattaggttcgtggcttcggtgatgcccgcctgcccgtttccttgtgcgtaggcacttaccacggcggcaagtatagccgccgacaagaagattttctttctcattgtgatttgtttttaatgccgggcggcgggtggatagtccgcctttcccggctggtgaataatttgaaattttagtggtcggggatagtcccgtttgtctgtttggttttcaggttgccaatcaaccgtaatcccgttgtttcatgctgtcaggcttatacattattatattataggaaatcgttcatgtcgaacgcttcgtgttcctcgcttgtatcgccagttccggcagggacagcagccgtagctagttccgcttcgttgcgtcccagcagttccgccacctttgccagcccgccgttgatgttctccaccaccgcatcgtagaggttcgtcccctcaatgcttgccagtgtcccggcggtttgccgtttctccgcttcggttgggttgtcggcgttcgccgtgcgtaccgcttcgcccagttcatcgaagctcacgcccgtagcccgtccggtatcatcgtcaccgtccatgtacccggctatttcctcgtcctcgtagtcgggttcgtcattctcgtaaccgggcgtttcttccgcttcggctgctgcttccggaatgttttcttccggctgtccgtcagcctgcggcgcaaaaatagtatcattttcagccgcttgcgggatgtgtcccgatttgtcctgcgctgtcccgattagtccgcccttgtatcggctttcacctatcagcgtgtagcccgaaaccccgtttcgtgggagtggcgcatcatccgttctgcccggtgatgtccggctgtccgtgtagcgataccacagccatagggcgatatagtacaccaaaagcccggtaagtatgcaatagattaccatagtcagacaggcttttggaagttgctttcgtacagggtgtttatctcgtcttggtactgctcgaagtgtcgcagcagaatgttttccacgtagctgcttaccgtcaccttgcgcccgcctatcactgtcacgatacgcatcagcttttcgtgcgtggtacggctcacgtacaagggctgtcggtctgccagttctactttctgaaagtaggtttcccggtagtcgcccgaaccgcccttgcgcttgcggtttgtcgttttctccacccgcaccgtttccgtctgctgttcctcttgggtaacttgtgatgcaagattggtatgtggtgcatcattcggtttattatcttctttactgggaacaccctgcgagataagctctttcatgaaatcctcgtctatcttcggcatcccgccgctttgctttgccatatcattttaatttgatgtagtacactatttcggttatcagttcttccaagttgcttccccttaccagcgggcggctggcgggaaagagcgtggagcggaacaccgcctttttatccgccaccagttcctttttgtagcgtttggtatcggggataaaggttttcatcagcggcagttccagttccttaatggtcttgtcgtaggcggtgtaaaggtctgttttctccctaccgtccaccatgttccaaaagaggtacagcccggcaagtcggcaggcttcattcttcactaatagcttttggatagccattgcgaacgacaggctgctttccagcaccaccttgtcggcggaaatgggggtgaaaatgtagtccatgcccgcaagggagtttatcacgccctcgctgttcaccgtgccgggcaggtcgaaaaacactatatccggcacgtgtccggcggctatatgttcgtcagccgttgcaatcgccttttcaggtgaactgcacaataccgggtaggctttcttccccagccgggtgaactgttcatacgccattcgcttgtaatcttcatccgccccgacctgctcggcatcccgctttcgcatcccggcaatggagtgttgcgggtagtcgcaatcgaccaccgccacatcgtagcctttgaggtagtagaggtaactcgccgccagcacggtaaaggtggttttgccgaccccgcccttttgggtggaaaaggcgacataaaggggtgttttctcgttttccatattgcttccgttcattattggttgatagatttatttattgctttcaatcaatccagccatatagctttctttgtttccatattgcaatcttgaaatattgaaagactgttttatttcaatcttgttttccagctttcattctttcttgaaatattgaaatcctgcaatcacgttttattgaaatcctgctttcaatcattctttcctgattggaatatttctttcaatcttgctttcaatcttgaaatccgatgcaaaaaaagggagaaaaaacgtcccctgaaaaccttgtcccgatttgtcctgcgctgtcccgttttgtccaccaaccgcctattttacagcattataaatcaccgttactttgcagcggagtaacgaaccgcagggggcgcaggtgtaaaacagggctggtgaatggctgggcttaccgttccacgctaaccccaatccgtccgtgacggatttcgattttcgtcagaaaatagcaaggtgtgttctatggcacatagaaccgttttccgtgcctgaaaacgccttgcccctgtcgggggtaaaaatcactccgaagtcgtaattttttaatccaaagaagcatggaaacaagaagaaccaacaagggcggtcgccccgccctcgcagacccggcgaagcatcgccatgtcctttacctgaacgaccgggagaatgcccgcttcctctcgcaatgggagcagtcgggcgtcacgagcaagtcccgtttcatcgccgcccggctgttcggcgagccgttccgggtggtgaaagtggacaaatcggcagtagaatattgcgcccggctgaccgaattttatgcccagttccgggcggttgcggtcaattacaaccaagtggtaaaggctctgaatagtaacttttcggagaaaaaggcactggcttttctctataaactggagaaagcgaccaccgaactggctgtgttgaaccgtcaggttatcgacctgacaaacgagtgcagggaactatggttgccaaaataagcacgggcggcaatatgttcggcgcactggcatacaaccaaaacaaggtggacagcggggaagcaaaggtgcttttctccaaccggatgctgttgggcgaggacgggaatttctctatcggcgagtgtatgcgcagctttgaaatgcagatgcccgtccagctatccaccaagaagccgatacttcatatttccataaacccgcacccggaagacgtgctgaccgaccggcagctttccgacatcgccaaagagtatatgcggaagttgggctatggcgaccagccttatctggtgtacaagcataccgacatcgaccgccaccatatccacatcgtggggttgcgggtggacgagaacggcaagccgctgaatgacaagttcgagcatcggcgcagcaagcaaatcacccgtgaactggagcagaaatacaacctgcacccggcagaacgaaaggaacgtgccgaacgccccgaacttaaaaaggtggactatgccgccggggacgtgaagcaccaaatcggcaacaccgtgaaagcggcttgctatggctaccgcttccagtcgttcggggagtacaaggctttgcttgccgcttacaacgtgtgcgccgaggaagtcaaaggcgagataaacggcaagccctatcagggcattgtctattccgccatgaacgacaagggcgaaaaggtgggcaacccggtaaaggcttcccgcatcggcaagtcggtaggttatgaagcggtgcagcgcagaatggagaaatcgggcgaagcaattaagaacgggaaactgaaagagcgcacccggaagattgtagccactgccatgcagaccgcccgcagccgcaaggaactggaacgacagctaaagaagcagggcattgatgtggtattccgtcagaacgacaacgggcgcatctatggcgttacgttcatcgaccacgacagccgggtggtgctgaacggttcacgcttgggtaaggagtattcggcgaacgtgttcaacgaacgtttttcgggcgaaaccggaaagatacaccagtccgaagtggcagcaccgcagcaagaccagcccacgcatcaggaacagccgggcttcacgccgaaagccgacatcgtttcgggcatggcttccgtgctgggtgctttcggcggtttgctgggcggcggtgcatcaggcggtgacgagccgcaggacaccgaccgccaaaagagaaagaagaaaaagaagcgcacaaggcgcatcaactaacttaaaaacattacaatcatgcaacaggaagatgatttgagagggcttgcaagggtcatggactttatgcgggctgtcagtattctattcgtgggaataaacgtgtactggttctgttactccaccctgaaagaatggggagtgacgtttgaggtgatagacaagatactgtggaacttccagcgcaccaccgggctgttctcgtctatcttatggacaaaactattttcggtggtgttcctcgccctgtcgtgtatcggcactaagggcgtgaaagaggaaaagataacgtgggcgaagatacattgcagccttgcggcgggtgtcgtgttgtttttcctgaactggtggctgctggaacttccgctgccacatacggcggacactgtgttttatatcgccacgctgtcggcgggctatatctgtatgctcatggcgggtacgtggatgtcccggttattgaaaaacaacctcatggatgatgtctttaataccgagaacgaaagtttccagcaggaaacaaggcttatcgagaacgagtattctgtaaatctgcctacccggttctactataagaagaagtggaacaatggctatattaacgttgtaaacgtttttcgtgcgagcatcgtgttaggaacgccgggcagcgggaagtcatacgcagtagtaaataattacataaaacagcaaatcgagaaaggttttgcgctctacctgtatgattataagtttcctgacctttcggaaatcgcttacaatcatttgcttaaccacttggacggctacaaggtcaagccgaaattttacgttatcaactttgacgacccacgcaagagccaccgatgtaaccctataaacgccagcttcatgtcggacattgcggatgcttatgaagccagctacacgattatgcttaacctcaatcgaagctggataagcaagcagggcgacttcttcgtggaaagcccgattatcctgcttgcagccattatttggtatttgcgcatctatcaaggcggcaggtattgcacgtttccccatgccatagaactgttgaacaagaaatacgctgatgtattcacgattttgcgcagttatcccgaactggaaaattacctttccccgttcgtggacgcttgggaaagttcggcagttgaacagttgcaggggcagattgccagtgcaaaaatcccgctttcaaggatgatttcacccgccctttactgggtaatgacgggcgatgatttttcacttgacatcaacaacccgaaagagcctaaaatactggttgtcggcaacaatcctgaccgccaaaatatctactcggcagcactgggattatataattcccgtatcgtgaagctgataaacaagaaaggtcagcttaaaagttcggtgataatagatgaattaccaactatatattttcgggggttggataatttgattgccaccgcccgaagcaacaaggttgcggttctgttaggctttcaggattacagccagcttacccgtgattacggggacaaggaaagccgggttatccaaaatactgtgggtaacgtgttcagcggtcaagtagtcggtgaaacggcgaaaatcctttccgagcgtttcggaaaggtgttgcagaaacggcagagcatgacgataaaccaacgggaaaaatccacctcgataagcacccaaatggacagcctgatacccgccagcaaaatatccaacctcacgcaaggtatgttcgtgggtgctgtggcggacaacttcgatgaacggatagagcagaagattttccactgcgaaatcgtggtggacaacgaaaaggtgaagcgggaaaccgcccattacgtgaagttgccgcagattatcgacttcaccgacaaggacggcaacgaccggatgcaggaggagatacaagccaactatgaccgcatccgtcaggaagtcaggcagatagtcgaggacgagataacccggattaagaacgacccggagttatgccacttgattaaggaggaagaatagctatatataataatgtatggagtgaagaacagccgatgtagctttacggttgttcttcattttgctttttggtgcggtaggcttcaaaacgcactaatatttcgtgcaggttcttcaatgcttccacagccttgcctatcggcggcatcttgcttttgtcgaaagtcagtttcttcaaatcggtagtgtacgccgtagccacttcgggtaacgccatgaccgcttcggcatccttgaatatcggtgcatcagccagcgacaagtgcgaacgggagtttttatttagtccgtcctctatcgtcacccggtacatggcatccaagaaatcttccgaatgtaggtaatcgttatattcctgattgtggtagagtgccgacaagtcgtaaacgtcacggatatgctttgccaacagtgcggctgcatcctcattgtaagacagctttaccagccttgaaaccttgtcgcagatagtctttcgggggttgatacactgcgtttcaaaactttccagcccgtaggtgcttatcagttcctcttgcccgatgctttcaagaaaggcggtcacaatcggtttgataacccgcttgtccgccgggtagaacatcagttttttgtccggcaggtcacaggattttatctctacttccaaatgttctttcagtcccacgccttgaaatacattgtcatacgagaaatacagtttacggtaattaccgcccgtttccgacaaatcttccttgtatatgtcactattgagttcggctatgtatttggaaagtttcttgttcaatgtcttttctgcctgcttggacgcacctttatcacccgtgaacacgaacaagtccaaatcttccgagaaacgttctatcagcccgtaggctttggaaagtgaagttccgcctttgaagtaggtcttatccgcatattcggacatggaaatatcccgcagtatcttcgatacccagtaatccttttccacgtgcgactgctcgtagccgaaatggtcagccgccagtgcgatgatttccttgaacgcttccttgtccgaatgtaaattcatatttctgtcctatgctgttttataatccaagttgaaccgtgtcgtgggaagaatggtctttgccatttccgtttgcaatacggtttgtctgatgtcgcccagtatatccgccaccacctttctgacacgtggcgggtaacttttcgccaaagatacgattttttccagttccggcaggctgtacccgttgaaatattggcttttgacccggttgtagatgtcctgcccggttgttccgggtatgcgcttcatgtcctttatcgcatcgagcagccgcaagtacgggacaaggctttcatccggatagaccatgcagtaggctttcacgcactctatatccaagttcttgaaacggaaacggcgaaccgggttaggagtggctatcgttatggttgtggctacctgttcggtcagccccattttgttatagatgtaagcccccgtgatatagccgttcagtttttcagtcaggtagcggaactgttcatcctgatagacaggcagctttcccagccccagcactgatttcttgggacggtagtacgcccccttttcaacccgtaccagtacccctttgcggctctgttcggaaagtagcaccgcaacattggcggtcttttccgtttcaaacgataaatcccggaacgtgaatatacgcccggtatctatccgttcaatctgcccaagtatctcttttctgaatgaagccatatttatgtcctttgtttctatatgcaaagatagtatattatgtaatcacctgcaaaaacataacaaagattttgccgaagatgttttctttttgtcgtgtcacctgataataggagaataacggaaactcaatcaaaggcttgccatacgcttcataaacgcttcacaaatggctcacaagtataatgcgatttttgtaaaactgttgattataagccgaaaacaatatatacaaatggctcacaaatggctcgtttaaagcaagcgattaacttcggtctgtacccgttttaaatctccaaccaacagttggagatttaccgcacccggataatttcaagctccgcaggacaaattcgggcatcccttgcccccgtttttagtcgctatctgtagactggactattattataccattcaataatcaaatcattatcgttattatggacatttaaagtgaaaaagatattcctataatgattaaagcaatagatgcaaatatgtatctatatctttttgtagaaaacattgctcctatacaagagatagatacagcaaattgcatacattttaaacttaactctgtagtcttaaatatacacatagacaaaaaagataatgccaaaacaaatagtatagcattcaatatatatttcagtttcatattcctttgatttacattgaccttattagcagtagcatataaattgctcatcctaacccaataaccaatcctatacaaaagaacaaggtgaatctcttttccttgtgtttcagcccatagaccagcccgataatagcacataaaggaatattagatgaatctgcattttttcctttatttacaaggtatttatgactttctttgctcaatttgcaaatctcacggttctcattgttctgttgtagcatacatttatgcaacttaatgttcccatgattcagtttaatctattttctctaattcaattgtagctactttctctttatctggactaatttcattctgtataatggttatatgtttttgggtatagcttttgataatccaaggggctccacccaaatataaagcattgctattaaatgtgatatatttcccttctattgtataagtaatatcaatttcatcgtaaccttcccaatttactttccctttccgagtatctacaaattgcataccgacccccatattttgtactgtccaagcctcacaatgccctgttccacgccatgaagtctgataaagtgcttcgggggttaattcatttgtctgttcattatcatcgtcgcagcttataaagctgaatgtacagaggaatagcataagtattccaagaatttcttttgttttcatattcttttttttaatctcttgtttaactcattcaatctttattttgtctcttcgttgaaccaaccaaagataagacaaagataaaaagaagaattctttggcagattaagatactcttggaatattgttataatgtaaatttctaaacctatgtttattttttgttgtcaaaactttgcttgcgtctgattcggctcatgtgtatgggtgtaattttaaggtaggatgctatttcttttagtgataccatttgaaggattgcagggcatttttttaaaagttggaggtaacgctcttccggtgtgaatctgaataaatccaaataacgtgaatatgattggaaaaacatctgttcggctgcgatacgggctatccgttggttttcattattttccttgaatttttgctgtaagaatgtagaagaacagatgtaaatctcgcacgggattatcgcctgtatattcaattctgatttcatgccatataagcaagtgggataatcggctataaattcatttggaaaggaaaaaccgacattatacggcttgttttctgtccggttggtgcaactgtatttgactacgcctgataagataaacccgaagaaagaacaggcatcaccttcatggagaataaactcattctttttataatgtcgtaactctccatgtttcagacacaactccttgaagaagtctatgtctatgttactcatatatgaattgaattcggctatcatttgtatataagagaaatgtataaaaaatatctgaatttccatgtttggagtttagtctgttttttgtctatatatccaaaccgtactaaacttttttctgttgactgcaagatataagtactggcgaaaagagtaagaataaaaggtatttctttttgacagtattacttttaataatttgaggaggaaataatactctaagtaaaggcttattctaccgtccgagagcttattttgctccagcttggggttttctttcgttttattttctaacattgccattgtttagaggttttatctcgatttaggtgccgtaaccgggtaattacactaaatagttgattttcttttgttttttgcggatgcaaaggtacaaaagaaaatgatatttcaaagtgtactgaataacagaaaatggcaaaaatagagaaaaacagaaaatattcaaatgactgataataagaaagatgaattatttttattctataatctccatgtcttgtatcggcattggcattgggtggtaaagaagcaatagataacatccatattctaaaaactattccctacatagaaatgtcactccaatctatcggggatttgaaacgagtgcaataacagattactaacgaagcgcgatgacgcttaaacagtgttccccgctaatccattaaagggttcacatatggttcatactcgaatgattttcttttgcaaaatatgcaaattacttgagttttagctatttcaaaaaacgaccaaagggttcacaaagggttcatcgaaagagagtgaaatcattcactctctttttttatgcccttttcaattctgcaaccaatggttgcggaatttcatcccacccggacaaatcgggacaccgcaggacaaattcggacagcccttgccgcccgtccaaatatagcatatttagtcgctacctttgggcgggactattcccgtaaccgctaaaatttcaattatttatggcaaacagaatgaccccgcccgcagaggggcaggaaaaagacgtgctgctggtcttggataaacagcagggaaaggtgagtgccgttaagggtattgacaaggagggcaatttgcagaccgtgccgccgacacacggtggcgagttcatgcaggtggacaagaacagcgatgtgttcagcaacttcatttccaacttctaccgcaagtatcaggacacttccgggctggaactgttcagcgtcaaggcttccgaagcggagcgggacgcaaaggcaatcgaggaaaaccaccgcaaccctacaccggagggcgacaagcgggctgaaatgcttcgagttccgaagcccgacttccacgagttcaagcagggttaccgcttcgacccggcaaaaatcgactgggagaacctgaaaaaagtcggcatcaccgccgacaccctgaaaaacacgaaggacttcgaccgggtgatgcgtggctacaagtcccgaaatacctacaccgtttcggggacggtgggcggcttctacctcaaacctaccgatgtcaagctctctttctatcaggcaaaggacggcacggtagtacccaagctgcacggcgtgcagcaggacgagaaactgttgcaacgcccgttccatgaacacgggttcaccaagcaggaacagggcaacttgcaaggcactggcaacttgggcggcatcgctgaaatcaaagacccgaaaagcggcgagcaaatccccgtgtttgtcagccgggacaggtacacgcacgaactggaatacatgcgggctgacaaatggaaatgccccgatacaatctgtaacgtgcaagtcagcccggaacagaaagccgcctttgaagccgggcaagcggtgaaaatggaaaacctgcaattcagggacggcacgaagcgcagtgcctatttgcaggtcagtgcggtggagcgtggcttggagttcctgccccgtgccgccgtccagttcttgcagcaggggcagcagcccgcagaacagcaggtagccgggctaaaggacggcaagggcgttgagttcaacggtcatgtacagcccggcgcacagggcaaatcccacgacaaggtgcagccgaaagacgttacccccgccgccgagaaccggacgcaggtagcggtcaattccgggggcaagaccaacgaagccaccaagcagggcaaagagccgttgaaacagggtcaggacaagcccacccccaagcagaaagagaagcaggagaaagcgcaggacaagagcctgaaagctgacaagcccaagaagtccagaggaatgaaaatgtaatatccaccattaaaaagtaaagaattatgattgcattgatagcagaaaagcccagcgtggcaaaggacatcgcccgcatcatcggtgcgaccgggcgtaatgacggttatctttccggcaacgggtatatggtgacatgggcgttcggccacttaatccagcttgccatgccggaagcctacggcgtggcgaacttccgcagggagagcctgcccatactgccgcccgattttcaattaatcccccgtcaggtgaaagcggagaaaggttacaaggcagaccccggcgttctgaaacagttgaaagtgataaaggaagtgttcgaccagtgcgaccggattattgtcgccaccgatgccgggcgtgagggtgagttaatcttccgctatatcttccattacctgaactgccggaaaccatttgtgcgcctgtggataagcagccttaccgacaaggcaatccgtgaggggctggataacttgcagccgggagagcgttacgataacctctacctctctgccaagtcccgcagcgaagcggactggctgatagggataaacgccacccaagcgttgagcgttgccgccgggcagggggtgttctcgctgggcagggtgcagacacccacgctcgtgatgatatgcagccgctatttggagaacaagaatttcgtacccgccaagttttggcaactcaaagcggcgactgccagcgggggaataaattttaccgcccaatcgaccgccaagtgggaacagcagcccgaagccatagccgccctgcaacgggtaaaggatgccgggcaacttgtggttaaatccgttgagaggaaagaagcctgccaagaaccgccgcttttgtacgaccttaccacgctgcaaaaggaagcgaacacgaagctgaacttctcggctgacaagacgctttccatagcgcaaagcctgtatgaaaagaaagtgatgtcctacccaagaaccggaagccgctatattccggaggacgttttcgatgaaatgccggaacgtgtcgccctgctggggcaatacccccgctttgccgggtatgccgccgggctggacggcacacccctgaaccgccgcagcgtgaatgacggcaaagtgaccgaccaccacgccttaatcattaccgagaacctgcccggcgaactttccaaagacgagcgggcggtttacgagctggtagccgggcgtatgctggaagccttttcgggcaagtgcgtgaaagacgttaccaccgccttgctgtcagggggagataccgacttcacggtgaaagggtctgtgatgaaagaagccgggtggcgtgccgtgttcggcgagcaggaaacgggcggggatgaagaagccgccagcctgccgccactccaagagggagaatatttgccactctccggcgtggatctgctcgaaaagcagaccaagccgaaaccgctgcacacggaaagcagcctgttggcggcaatggagaacgcaggcagggaactggaagatgccgaactgaaagccagcctgaaagatgccgggataggcacgcccgccacccgtgcggcgattatcgaaacgctgttcgcccgccagtacatcgtgcgtgagaagaagaaccttgtgcctaccgacaaggggcttgccgtttacaagatagtcaaggacaagaagatcgccgatgtcgaaatgacgggcatgtgggaaaccgcccttgccaagatagaagcgggcagcatggatgcggacacgttccggaagggcatcgaggtgtacgcaacgcaaatcaccgcagaactgctatcggtgcagctatctgtcgctgctggtgaaacctgcccctgcccgaaatgcggcagcgggcgcatcctgttctacccgaaagtggcgaagtgttccaacgtggactgcacgcttaccatattccgcaacaagtgcgacaagcagctttccgacaagcagattgtcgagctggtgacgaaacgcaagaccgggctaatcaagggcttcaagggcaagaacggcaaggctttcgatgcttcgctggtactggacgagcagttcaatgtcggtttttcattccccgaaaagaaagcgaaaccgaagaaatagcttatctttgccgctgaaatttcattgtgataggttttacagcttataataattgaaattttagtggttgcgcccggagggaaaccgggcgcatttttttatatgttcccgccaaacaggtaggtcgaacagaccaccccgttatccagcaccctgctttccgagagcttccacagcgagccggatgtttccccgacaaaaccgatgcctttgcccgccatgaccgggacggtgtagattgtcaggctgtccagcagtccggctttaatcaatgaagtaagcagcttgccgccacccaccaccagcatgtcggtttcctgtttcagttcatagaccctttgcagcggttcttcggtcaggaactccaccccgcagtccggcgtcacgttggtatcgtagtgtgacaccacaaaagaccgtttgcttttgtgcggccacccgccccagtgttcaaagatgtagttgtaggtgttagcccccataagcaggcagcttgcggcggcgtgttcccttgccgccagttccttgacctcacggggcatccagtccagttcatagtccggcgtggcggtatgcccgtccagcgatacggcgatgtgcgctttgatttgttccatattgtcaggtattaaagtgatataaatccctactgtcttggcacgttagccgccacccccaaaaagaaagcgtggcatgacgctgtttcaaagtagaggtactggcatacccaaatgtggaaacagtgcagccacgctatgacaaacgcatagcatatcctgcgctgaatatccccacattttgaaaagtgccagttttctactttgggacgttcggcgaacgtatatgttatatataaaggcaatattccggcaaccgccgtccaactgccgttacttttccgtgtaacttctgcaaagttaagcaaataccctgaaaaatcacgtgcaaacagaaaaaatcctgccgtgttatcacaacagggcaggacacaagcacctaaaaatacacaagttcagcccatacgcctacgggcagcttgcgttcctttgaagatgatatgaaccgatgacaaaacagctttggttcgccgtgtctttggtgatgatgtccctttcccgcatgaagcggatatagctctttgcggtgcgctccttgatgtccaatacctgctgcaactgctcgcaaaggtctatgtaggtgatgcgtgtctgccgcccgaagatgtcatgtgcgacattcaccagttccctttccttgcgtttctccttttcctcacggggcttctcgcccttgtacacgtgcatcccggcttccttgtcccatgcaaagagcatcagcggcacgtccagcgggcttccgtcccttactttcagggctttcaccaccgactgggcgggttcatcgtctttctctatcgaaaggattgtagccgccttgcgctgcaactcgctgcccaaatgtccccgcagcttcaaaccgttggggacgaaatgcagcacgcacagaatacacgtgttgtagatgccagccagccgataaagttcatctatcaccgccacgctttccgcttcatcgttggcactcttaacaaggtcggcgatgccgtcaatgacgaccaactggatgccgccgtactggtagtaaaacttatccatgctctgcacaatggcgttcaagcgttctttgcgtgacatacccgtcaggcagaacgctttgagttcatcgggtttgtccggctgtttggcacgtgccagcaggttgcttacattcttgaacagttgcacttccgattgctcggtatcgtaaagcaagaccgccttgtgcctgccgttggcggttatctgtatgcccagcgtatctacttccgcaccagccgggcagatgcagcccgccacgattgcggctacataattgctctttcccgttccctcgcccccggtgatgccgaacaggttgccttgtgtccccagcggaacgtcacccgccgaaataatctcttgtgctttggcgggcgggttgttgaaatctatctcgcatgattttagcataatcaatgtgtcgctatacaggttgtctaaaaattcgataaacagcttcaggaaatcttcacgggtgttcccggctttgaagtagtcggatatgtccttttcctctttcgttcccggaagcgggagcagcaggcgtttcacgccaaattcttccaatagtttttcctgcttgcatgaactttccctgcccgtcttgtccatgtcaaagagcaggacgatgtgcttgaagcggaacgtcagccgatagaccagcgtgggagggatagtcaccgtttcgctgttgaagcagatagcgtgaaaaccgtgcgccgccagcgaaagcacgtctttctcgccgcccgtgatgaatagcgtgtcgcctttggctggcagttgttccagcccgaaactgtagttctcgccgaagctgccgccgtagaggaagcggggcgtggagaacgggcggtacagcttgatgtgctgtttgcccttgtagccgtacatgggttctgccaccgatgaagtgtaggtgtacggtttgccctctgccgtttcgctgtgatactcccggagcgagcagaccttgtaacgttccagcagttcgggcgtgatgccgtactgttgccagtacaccagttcggcaagcgggaacttctgttcccggaactggtagggcttgacgggcttttcggacgtttcttcgggtttgtccggcactgcccggcggacggttgccgggggaacggaaaccggagtgccggaagccagccccaaacccaagtcccggtcgatgatttccagtatctccacgaagtcagccgcccggttgcagtccagcccctttaactgccccacgaggaagaaacagtcgccgctataactgtcgttgccgaagtctttcatcttgtagataccgccccggcggtcgaagtagatgttgcaggaagccttgctgtcctcgtacagcgggttaaggaagttgcgacctatgcgccagtttccgggcaggtagtgtttgaacaccgccagcccgttacttgtcctttctaagatttcctctttccttagcatacaactggtggttggttatcaggttgtcgatgttctccttgttgctccttatcaggcgttcttccagcatccggcgtatctcgctgaccttgtagaagtagcgtcccctgatgttggaataggcgatagtccccgacacccgcaggcgttgcagggtcttttcgcttattttcaggaacgtgcagacctcgtagctgtccacccacatgtcttcctcgctttgccttgccgtttccatgtggttgaagatgtagtcggcaatggcggtaatcttgttgtccagttccttgtaggctttggactcgaatgttattatttccataacggtaactgattgatttgccgcaaagttcgggtgtcctgaaaaataaaacgccacagatgtacccacctgtggcgaaataaattttgttaaagcacggttgcctaatcctgctccctcatgcgcatcagcaacctgtctttcagggtggagaggaagcccgttcggtctttggtcttggcttttagttccatgtaggtgtggtagaagtcgccgaggtctatgtcgaacacgtattcaaagtaggctacaatctccttaatatcaaccgttcccttgttcagacagccgcaggcgtccagtgcgtagataagttccaccaacgcccttttcgtccccgtccagcgcaacagcctgcccatgaagccgttcttcacccgcttgcgctgttcccggcgttccagctcgtgcagacggttggtgaggtatatttccagcagttcgttggctaaaatcttggctaccttgaaatcgtgactggtgctgaactgtgggtctgtttcgtaatagaaactgtccacgatgatttgtatgtcaggcttcccacgtatgaaatactgcctgtccaagtaggtggctttcgttcggtggtactggtagaacgccaagttccgctggaacgaccttgaaatccggtcggtttccgacagcaggtagtcccgctgcacgtcctcgctgccgctggggaagcgcacctctatcttgtaaacggtattgtaatagatgattttgctcgctaaaagcggtttcagttccttgaagaagtgtatttcttcttccgtgctggcgaacgggtaggagattataaaggttttgagttcgcccagtatctcttgcaggtagtccacgcataggcggcagagcgtcagcgtgtccgctgcggtgtcctcgtattcctgtatctgccattccactttttgaagcagtccggcgaagtatgtttccaacggtatcttatgttccataaccttgtgcttatcttttatgaagcacaaagttacgggcataaaaaatcagttttattcttgatttttcacattacgttcttgtaactgtgcattttcttgtttcctgcgcttttctgcgtatttctccgggggtatctaaaagatacgccttgcagaagtcgttcaggttcgatgtcgatgcgaacccggtggtgaacgccacttcggtaagcgtgaggtttgtgttcaacaggtagtgttccacgtcctttacccgttcctttatcacccattccttagccgtgtacccggtcattttctttacctttcgccggaacgagccgtattccatgccgcatttgtccgccagtttctcggcatcatagaccatgtagcctttcagacgtaccatttcggtgaacgtctgcctgcccagttccggcagcatccgttcggcgtggcgcagttccttttccgtcaccagcagtcggttgccccttaccgggtttctccgcagcaggtggaaagcgtggcataccgtgttgtacacgttgcagaggtactgccgtcccggtcgcatccagtggagcgcatcgcagtaggcggtcagttcgggtatctcgtcccgcttgcggtgctgttccgccagttcgtcaagtatggcgtaatgggtggtggacatacccagcaggataatgattgccttgtagtccttgtatgccgccagtgtcggcgtttccggcaggcttttgagcgtgtcgcacacgtgggcgcacagccgcccgtccttgctgaacggttcaagttccaagtagttgtccattttccggctgttgtgcagcagccatgttaccttttcgtccagttccttgcaggacgcttccaactccgcttcgggagcgggaagcaataatgatgtaatccgttgttccatatctgatgttttatatatgaatgacatatcatttgttccacttcacgcaatccgtccaaccccattcatcgaacagccatgtttctaagaagaaaagtacaaagggcagcaggaacagaaaatatgcctgtactgcgctgatatgcttagagcggcggtagcggttcaacaatgcctgtacacgggctttcctgtatcgtgcaagaataaatacacaaataagcaaaaacattgcacctaaatagccaagatgtaaggacgaccattgcggtacattgttaatcaggagaaagttgccgggcagaactactacccaccaccaataccaaaacagcagtataaaacctgacatccgccctatcttcttgccccaaacctctcccttgaaatataggtagtcaaaaaaatagtatctgtaattcgtccggtttgcacgctgcttcactcgttcaaaatagttatctgtcttttttattcctttattcataatggtttggtgagggaaagcgttcaggggttatctttccttgttaccaatgaatttacttttatatatagcgtactctactgtgtaagtagccagcttcacgcccaagaacatacctacaagcaatatatatgctactaagcaatattgattatacaagaggtcttttaagaatacaggtatcaataaggctatgattgtagcgttctgaaaccacttctgtactttcaataagaggttaatgtataaatgatttcctatgtaattgaacccccatttataattataccgtttcagataagatagtgaaaaccacaatcctacaagtgaagtaataagggctactcgccaccatgctcccatgtatgggaacataccttttaagaatgtcagcaaaacaacacctattatgctacattcatatacaattcttactcttgttacattattcatatatgtacgctattggttagaaaggagcatcgtcagatgctatctttcgttgttactaacttattaaatctttattgtataatttttagccaatgacgatgtgttattataaaataaagtaatacaaccaaaatgggataaatcatccatgatatgaaggaagaaatcttttggctattaaatattagaggtttactccttataatttccataccttttttccttttgatataatacgaacagaatgtcttgtatagtaaaacatagattatgataaaaaacacaaaaggggttttataattgaaattctcctttatcagtagatacgtcaatactataacaggaagaaataatattccacatattatctgtatcgtccgctcatgtggattttccaatataaatttatccctattaaatatgaatatctgataatacatcgcatctaaaatgaattttatcataaagagttattcgtattgttagtaatggctaagcggggaacgctgttaggcgttatcacgctttgttataaactcaaattactttgcatgattggcttttatttacccaccattcctgttcttccacctcacgagccttttgtatctcgtccgttgtcagattttcattgtgataggcattatatagattttcccaaccattcttacgatatttcggtgatacaatccattcgcctgcatcattaaacaggcagaagtttgcaggagtatcgggtataatctcatctgcccaagaacagacttttgtcagtccctttgcggatttccacttaccccgatattcagataagttcaatttcagttctgctatttcattccgtcctttctctatttgctgtccgctcatccgatacccctgcttgaaagaaccggagaatgtaccgctatatcgtttatctccgtattccgcaaacgagtaatacccgtatatgaaaccgtccaattccgtatattcactttttatcatttgggaacaggaagaaatgctatctacacaaacctttcccttaaacggacagattacggataatcgggtacgactgataccctttatctcatattctctactatccattttccgaacttcggtaatatgaatatcaattcggctacaatcttctcctaatatgccaatcatgcttaaattgtcaaacaagcccgaaaggtcttgctgcaaaatatctgctttgggattttgtgaataggctactccacaaaaccaaaagagtaaaaagataatgatatggtatattttctgtttcatattttgcattactgtttataatggctaagcggggaacgctgtaagcgttagcccggtttgttagtagctatttattattcaatcggtttctttccagtattaggttcacttccttttctgtatgggaatatttcttttttgaaaccatacctacaaactctaaagaagagtccaataatggggatatatctccatcaattacatcatcaaaatgcaagaatttgagtttcttcattcctgccaaaaatttcaagtcttttagacttgaaatactaatctgcttaatcgtattgttgggtactaattgggttaaatcttgaagtcgtttacagttacgtaatctaagtattttaactcttgataaacggttcaaaacactaatgtccgttatgttattgcaataatataatgataattctttaagtctatttgaattacataaacctctaatatctatcatttttcgagaacgaacaatctccaacgttcttatgttagttaattgacataaaccattcaaatttatatttttggcatcccatagtgtcagttcttctaacaaattcatgcttttcagttctttcaaatcttctgatttgagattataaatatgcagtcgtttcaagtttattaaagtatctacattttctgtttgttttgtatgataatacttcaattcttcaagtttgggaaacaaactgaaatcaatagtaaagaccttgtcaatccaaagtcccaatttttttaagtgcggtaaaacacttagttgatttaaattgcatggttctattgtaaagtcgtaccctgaaataatcaaggtttcaataaaatcatattcacatattagacttacatttaatgtgtgtttacaggaaacaccactgatgccgatgtcgtccgttgatattaaaatatcattatagccttgattttttgcaaactctaatccttctcttaaatagagaggagatattattaaccgatttacatctggtacttctttgaaatgttccatactactatttgtttctgattgctactaatggttcagcagggaacggcttgccgttatcctgcgttgttatcaacctattctatattcaccatttatctgcaatttcaaattcgccgattgtttgggtacaaatgtcaatgtacggaatagtcttgactatcttgatgttttcaatatcttcacttcctcccaaagccaaaagtagagaatatccaaaacactcgtcataatctggagttccgagtttttcttgtattataggataattttctaaatcaaaccagcctttcaagaaactttcatttaccattaccttattaaaaatcgcacgaagattggcaggaagtattaaatatgttccgtatctgacattcagataaacgacgtaattattcagtctcggattctttacataggcaaagagatcgccgaaagccgtacacatgaatggtagaaatgattggtcatcctccttttcaaaacaggagtttatcacatcctgataatcggatggattgatgagcttaaacagcccattacaaaaacttcctaacccgacctcctgccataaagtattcagttcgggataagacaaatcagcatatttagcaataaaagtatcatctactgcttgcctcttgctattgaggcttttttctaaaaattcttcgtacatatttctacgttttatggttgataatggctggacggggaacggcgttagtccgttatcccggcttgttatgaacttactttacctcttgtgcctttttataatttgcatagcgagcatttagagtgtcccgccattcttgacttgggcaagagtttattaattgaatatacctatcatcatcaacacaaacggactctacaagtcttagtaagctccactgcaaatcataaaaagcattttcagggaagatttgtaccaacaccatagcttcatcaaatgatatggggaattgtatttgttctaataaagtatcataagcatttatcaactcatcaatgctatcagaatcattgatactttcattaggcatacgacctaaatctttcaactgtaaaatttcatttctcatatcgtgtactctaattgttcataatgggttagcagggaacggcttgccgttatcctgctttgttagttgcatcgttattgttattatctacccatgctttgatttcattcggaaaatgtttatgaaacattcttatccacaactcatcgttactcttgtcgggaatacaagcatgaatgcactcaaaccactggttccacatccaatcaaaatcatcttctggcatcatcatccaaagtagaaaatctttcggttcccaatcagataatttcataatatccttttgcagaaccttacgcatggattgaagttgttcttttgcttcttgactgttgatttttcctttccaaaaatcaacagccgagtgtgcaaagtcatttatctgttggatagtagcattaggaaaatactgtttgtccaaatgctctaccatatcttgcataaaacatatccgacgttgatgccattgatgctgctcgtcatcttctatttcatctaaaatatactctgcaaacactttgatagcatcaagtccattattttctattttactccattcggctatattccaatctgtttgcgttttcactttattatagcaaacagagcatacttcatttggtagagtaatgggatgttgtctacaaatagggcatattttattaacattttccattctatctgatttttaattgcaactaatggttagcagggaacggctcgtccgttatcctgcgttgttagctgtattttagtcaaaagtcatgtaacacaaacagacttttaacaagataattttctactgtccatacggcataatatccgcctgcaccgtcactgttctgcgtgctgatgaacagtgagtttcctttacccaatgccacgacaacattgtttcggctcggttcgtatagatgtgctatatatgctgttggaaattccaatattccggcagggtgcttgacggtgacagatgcgtattcttcatgcggaatattatcatctatgcctgtcaagtcagaacaaccgtcaatactccgaacaaagcctgcttccaaatcataaacaatggcatgtttttgtggattaaacttttggaagattatctttatggttaatgtgtcgttggcatatacaaggcatttatccgtactttgcggctgtttcttcaactgtggcaaatctgccaaataacggatgcggcttttatggatctctcctgtatgggtatttccattcgggcaagtcttggttatgcccgtttctgctccatattctacgctatgccattctttatgactcttttgtgcatcccaatcgacaaacacatgattatccaataatttgcctattactgttccacttgtatcacgtacatttgtatatccgtctgcatcctgaatgacaccgaagaaacgctgttgtgcttgtataggcaagcaaaacagaattgccgatatgtagaaaataatctttttcatgcttctattacagctaatttttcgataaacgcaccttatggtgtagttcctattcactattaaatcattgtctaatcatcatccaaacaatccagcggattggggatttttgctttataggcgttcgatacgtgcagataaattgccgttgtttttatatcggtatgtcccataagttcctgtatggttcttaggtctgtcccttgttccagcaggtgggtggcgaacgtgtgccggagcatgtgcaggtgtacccgatgctttattccggctttccttgccgcttctttcaatatcttaaccaatgcgctgggcgagtattgttcgcctgcctgttcgccctcaaaaagccatttttgcggtctgtattcccggtagtaagcccttagttcgttgagcagcttttccgacagtagggaatacctgcacttcttgccttttccggcaatcctgattagcatccgttcgctgatgatgtcttggggtgtcaggttcagaagttcgcttcggcgtagtccggcagagtaaataagagaaatcatgcacctgtgtttccgattggataactgtgcaaagatgcttttcatttcttcccggcttaatacttcgggcaatgccttgtactcttttgcacgggctatcccgccataatattgccgcttgcctttccggactttctcgtaatagaacttgatagcgttgatgcgcatgttctgctgggtggcggatatgtgcttttcctttaccatgtggagcatatagctgtttatgtcctcgaccgtcagcaggtcaaggtcttgccccttgtggtattccatgaagtcgctgaaatagattttataggcttttatggtggaaaggctgtaccgcttctgttccagcagttcgaggtagcctctcggcagtatgtattcccttttaggtttgggatgccgcacgtaaacccggctgtaatcaatataggcgtggggcgaatagcggtcatagaaatccggcagtttaaaagcggtggcaggtatgtaggcagaactattgcctgtcttttccacgtccgtatcttgggcgagcagcagggcgacagcctgactgtttacatactctatccgtatgtagtccgcaccgtttctttcttccttgtacagaacgatgcttcctctctgtttctgaaccttatccatgtcgctgaattttgcttcgctccaaagataagataaaaatatcactttttgaacatctgttcaaaaataatagaggttaaaaaaacaaaagagtatcaggctttaagcagcgaatagatatggcgaaaattttctgccagttcgtccacgttcagaccgttcagaaatgcttgttcgtatgacagtcctaaaaacatttgccggaacaagatagccgttttcttcacgtccgtgttgctcctgatttccccgctttcttttgccttctgtatgactttctcccataggtcatagtcttgtcggtagattttctcaattttctgcctgatacccggatagtacatgcgcacttgtgacaggaaatgaaagtagtagaagttaggactacaatcatgcgggctgctattatcgccaatcagttcaacaatccttttcatggaagcggctactcccgccacgtattgcccgatgaactccgtcaacgtatcggcaggagcggcaaacttgttttccggttcgtgcatttttagcacgtatttgtccgccacagccatgaataaatccaacttgtgcggaaaataataaacgatacccgtttttgtcaccccgcaggctttggcaagcgtgatgatgcttgctttctcgtagttcatcctgacaaatacgccgaacgctttatctattacttcttcacggttagttattatcatacacgtttgtttttaatcggttacgaagatacggattttgttttaaccatttgtaccccagtgcttttttttagtgcaaggtgcaagtatatatttatatatatagcttgcaccttgcactaacccaaaaatatttattatcagatatttgcgagtttcaaaagaatgcagtatctttgaacccgaaagttaggcagacaaacacggtcaaagttggacaggcttaacgattaaaaatcgttactgtttcgttacctatttgaaattttgaaagcaaagtagctgacatataagcggttagagttataggttcaaaaccctctctctccgcaaacgaccgggaggtcggctgggttgcaaacgatattcgtttgcaacctttttgtttttcggaggcaacgaatttattcggagcgtttcgggatcgtccgtagtgcggacggccgacggccgggtattggcagggatatgtggctcttcggtcggtcgcgggaaggcgggccgcaactcgatctttgtcttgtctgtcggaagttgggaaaagttattatccggggtttcgaaatcgactacccggtgacggacgagatgtttgcccggccggaatagcgtttttttagctggtgcgggtatcggcgttgtgaagattcgtgttaaagaaaaaagcctccgttcgaacggaggcttttttcttgcaggcggaaggatctacttcgtagaagcggctctcttctccttgatacgggctttcttacccgtcaggttgcgcaggtagtagatgcgtgcgcgacgaaccacgccctgcttgtttacctcgatgctctcgatgtggggcgaatagagggggaagatacgctcgacgccgatgccgttggagatcttgcggatcgtgaacatcttggtcttgcccgtacccttgatctggataactacgccgcggaagctctgcaggcgctccttgttaccctcgacgatcttgtacgtaacggtgatcgtatcaccggcctggaacgacggaacatccgtcttggtccacatctgctcgttgacgagccggattactgcatccttgttcattgttgcaacaatttttttgatgatttctgcgttcaacattatcgctgtgtttgcctaccatgcagggatcttactctgcaatcctccgaaaatcaacggattgatgttcccggtcgtggcttcgcacccaatataagaggttgatacggtccgcaaatatagaaactttttcccaaacgggcaatcggctgtctaaaaaatagatgactccgcagccggaccgattgtgcggcgatgccggctgcggcgggtgtgggaggtgaacgggtttcatcttgaatcgtgtcgggaggtgcggattgcttcgacgggcggtgcgtatggatggctctcgaactttgaggcacatggtttgcggttagtctgcaactccctgccccgatcctttttgtttacaatggaattttccgacgggatcggcatgcggggaatttcccgggtgcagggaaggaagtatgtatgttgtatggaatatgggaggcggttcggacattcttttcgaacgagttcgacgaatgtcgcccgccttttcgtatatttgtcactaaaatcggagaaaaatatgatgaaagagaagttggtattcgtcaccaacgacgacggttacaattcaagaggtattcaggcgctccttgaggtcgcacgcaagttcggccgggtggtcgccattgcccccgaaacgccgcagagcggtatgagtcaggcgataacgatcaataatccgcttttcctgcgcgaagtgtcgaaaggcgacggtgtggaggtttatgctttttcgggaaccccggtcgattgcgtgaagatcgctttcgactactttctcaagggccgcaaggtcgatctggcgctttcggggatcaatcacggctcgaattcggcggccaatatcctctattcgggtacgatgggcggtgcgatcgagagcagtttctacggttgtcctgccatcgggctttcgctggacgatcacagtctggaggcggatttcgaagccgcgaagatttacagcgagcgcatcgtgcgtgcggtggtcgaggccaatccccccacgccgttctgtttgaatgtcaatatacccaagggacggcccgaagcggtgaagggtattcgggtgtgccgccagaacaaagggtattggcgcgaggagtttttccgtcgccacgatcctcggggccgggagtatttctggctgacgggtgcgttcgtcaatagcgaacccgaatcgaccgatacggacgagtgggcattggcgaacggctatgtttcggtggttcccgtgcagacggatatgaccgactatgcgcagatggctccgctggagcggatactcggataggatttatcggaccggaggctggtgccggagattgggcgatcctgttttgcggcggaagctgcccggggcgtaattccggatttcggtccgaagtcggaattgccggagtcgcaggaatgtgccgaggcgattttcgttcgtttcgaggtgaatagagggtgtttgaacaggcggtccgaaaataaattttcaattactcccgtcttttcctatatttgtattcgtgaagacgggaagcggttcgggccggtgcgtcggagcggaagaattcgaattttagcggaatattcaatatgctgatcaaaattttactcatcgtggccatcgtcatccagacgatcgcgactctgttcgccatccgtttgatccgtacgaccaagtacaattcgatctggattctgttcaccatcggatttacgctcctttccgtcgaacgggtcgtgcaattcctgcgtgccaacggtcagacgctgccttatgaggtgttcgtctggttgggactggtcatttcgatcagtatgtcgatcggcgtgatgtatgcccataagcttttcaagtacatcgcccggctcaaccgccagcggcagttgctcaacaagcgcatcctgacggccgtgctgcgcaccgaggagaaatcgcggtcgcgtttcgcgaaggatttgcacgacgggctggggccgttgctctcgtcggcccgtatgtcgctgtcggccctgcaacgggagtcgctgccggccgatcagcaggagatcatcggtaatacgacttatgtgatcgacgaggcgatccgctcgctgcgggaaatttcgaacaacctttcgccgcatgtgctcaacgatttcggcctggcgcggggcatccagaacttcgtgggaaagagttcggcgatgcacgacgtgaagatccgtttcacgaccaaccttcgctcggagcgctatgataccgacgtcgaggtgattctctatcgtgtcgtttgcgaactggtgaataattcgctcaaacattcggggtgtacggagatcaacctttcgctctccaagagcggcgatacgctcgcgctcgactatacggacaacggacgcgggttcaaccctgccgccgtgaccgattgcggcatggggttgtcgaacatcgcttcgcgtatcaactccctgaacgggcggttcgacatcacgagtgccaaaggcgtcggtatgcaggcgaaaatccgggtcagcacccaggctgagtcggcggaaaaactgtaacgatggaactttgcagaattatattggtggacgatcactcgctgttccgcagcgggatgcggggactgctcgaccggtacgacggaattcgggtcgtgggagaggcttcgaccggagaggaatttctggcgatgctgcccgcgacggaggccgacgtggtcttcatggacttcgccatgcccggtatgaacggggcggaaacgacggagaaagcgttggctctggagcccggactcaaggtcattaccctttcgatgttcggggatgagaattactactcgcggatggttcaggccggggccaaggggtttctgatgaaggattccccgatggacgaagtgttgcgggcgatcgaaacggtggcggccggaggcacctatttctgcgaggaggtgctgcggtcgctcgccagccggatgcagaccgcagtgtccgggtacgaaggatccgacgagcgcctttcgacccgggagatcgagattctggtctgcgtgtgccgcgggctgtcgaaccaggagatcgccgacgaactgttcatttcgaagcgcacggtggacaagcaccgggccaatattctggagaagaccggatgtaaaaatacggcgagcctggtggtttatgccgtcagacacggcctggtggatgtgctgtaagtccgatgtcgggcggagcgctgcgataatttcgatgaaaacgggcctcctttccggcttttttcggatttccgacgtgaaaattttggaaatagcgttcgattgattatatttgcgtgttgtgaaattgattctgtccggtttcagacgggtataacctgataattgaaatatgaaaagattgattagtttattggcagtggcgcttttcggagtggcgctggtcggttgcagtgacaacgaggaaactactcctcctacccctcctgatcccaagcctgtcgatgtttacggctggcatatgaccaaatgggaggtaggcggcgacgatacgaatttcccgaaggaggtttatatcgttttcgacgaggagaagaatttcgaaatgtatcaggacgtcagctcgaacgggttcgtgaagatgacgggtacctatactttcgacgaaacttccaagaaacttaccggtaaatattccgacggcgagaattgggcatacgactataccgtatccggtgtggactggcttttcggccagctcaatcaagaaaccggggagatgagcggtgtcggcgaaacgatggtaatgacggctgcggacgacagcacttacaagctgacattcgtttacggcatcattccggatgaggtcatcaactctgtgatggtacgcagcgccgaaggcgtacggattctgtaagtcatacgggattcatattcgacaaaataaggactgtgcaatgcagtccttattttattttattataacaagcgatttgaatcggaaaatcagcacgatgattttttcttgtacctttttggaatcatgttttttttgatgttctattctcaatatggatattataaaaaacagggagattgggcccaagagttgtgtgccccgcatccgtactggtatatatttttcggtgtttgtctttggattgcggcatttggaattattctaaaaaaatgtcttgagtaggaggtggtttccggcaatggacttttgattggatagttgtcgttttacaaaaaacaggagtaaaaatcacaaagatttttactcctgttttattcggtctgaatgtcggatcctcttgtgttcgccggtcgcagcagccgaggggattacagtttccggcgtagtttttcggcctcctcttcgtagccgggcttgcccagcagggcgaacatattctttttataagcctcgactcccggttggtcgaaggggttcactcccagcaggtaaccgctgatgccgcatgctttttcgaagaaatagatcagggtgccgaggctgcgggcgtcgatgcggggaatttcgatccgcaggttggggacgcccccgtctgcatgggccaggctcacgcccagttcggccgtatggttgatttccgaaaggcgcttgcctgtcaggaagttgagtccgtcgaggttgtccgggtcgctgccgatcttcacccggtgctccggggcggcgacggagacgaccgtttcgaacagcgtccgctctccctcctgaatgtattgtcccatcgagtgcaggtcggccgtgaaggtgacgctggccgggaagattccccttccttgcttgccttcgctctcgccgaagagctgtttccaccattcggccagatattgtaattgcggttcgtaggaggcgagtatttcgatcatgaatccctgctggtagaggatattccgtacggcggcataacgggctgcgggattttcgtcgaacgggactccgtcggccgtcgcccgttccatttcgcatgcaccggccagtagggagcgaatgtcgattcccgccgccgcgagcggcagcagacccaccggggtcagaaccgagtaacgtccgcccacatcgtccggaatgacgaaagtgcggtagccttcgcggtccgcgagggttttcaacgccccccggctgcggtccgtaacggcgacgatgcgccgggccgcctccttgcgtccgtagcggtgttcgatttcgtcgcggatcagccggaaggcaatggccggctcggtcgtggtgcccgacttggagatcacgatggccgcgatcgaccggttttcgacggctgcgagcagacgggccagatagtcttccgataggttctgtccggcgaaaagcagaatgggtttcgccggatgttcgtgcagcaggttgaacgggtcgctcaacgcctcatagacggcgcgtgcacccaggtaggatccgccgatgccgatgcagaggatcacctccgccaggtcgcgcagacgggcggcttcggtttcgatcgcctgcaactcctcttcgccgagggcggagggaagccccacccagcccaggaaatcgttgccggcaccttggccgttgtgcagcagcgcgttggcgtgcagggctgcggatttttccttctcggtgattgcgacatcggcgcgaatgggatcgaacgacagggttttcatgactgtattggtgttaaatcagttttgtcgtaagctcctgcatggcttcccgaacaggaacccctttgtaaaggacttcatagaccatatcggcaatgggcatctgcaccttgtggcgggcgttgatgtgacggatgcagtcggcggcgaaatagccttcggccacctgggtcatttcgtccaaagcatcgcggaccgtgcagccgtgcccgatcagcaggcccagtttgcggttgcggctgtaaacggaatagcaggtcaccagcaggtcgcccaggtaggccgaggcgcgggtttcgcgctggtcggggtagctttcccgcaggaaccgggccatttccatcgcactgttggagatcagcaccgcgaggaaattgtccccgtaacccaatccgacagccatgccgacggctacggcgtagatgttttttaagatagtagcatattcgatgccgtacaggtcggtcgaataggagagtttgatatattcggtggcgaatttgtgtccgatcgtatgcgaattttccggatcggtgcaaaccaccgtaaggtaggagagccgttcgagcgaaacctcttcggcatgggagggaccggtgatgatgcccagttgcttgaaagagaggtcgtaatggtcgtgcatatactccacgacggtggtgtagtcgtccgggacgatgcctttgatggccgagatgacgaatttctccttgagcggaacggtcagcgtttcgagcgtctttttcaggtaggccgaggggctggccaggatgacgatgtcggcctcggaaaccacccggtcgagatcgtccgaggggtttatgcgcgtgcggtcgaaccgtacgttgctcaaatagcggggattgcgacccttgtcgcgcaggctttcgagcacctccggattgcggacgtaccaacctatcgagggttcgttttcggtcaataccttggcgagcgccgtggcccagcttccgtatccgatcatggcgcatctggcgccgctgcctatcttgtggtccataagttttcggaataaaattttcttttctacaaaagtaaataaaaaacgggaaaggacacataattatccttcttttccctacctttgtagagggtaagacgcactcggcagaaaaaacaaacgaatttgttttattctgctttcattttcattacctttgttcctgatgtattgacacggatttcacgggcaggcgaaggcttctgggaaagaaagtcaatattttgattatcagaaattaatagattataatatagagagaggaaagcagagtactatgggacttttttcactgacacaggagctggctatcgacttgggtacggccaatactttgattattcacaacgggaaggtcgtggtggacgagccttccatcgtggcgttggacgtacacaccggtaaactggtggctatcggtacgcaggcccgccagatgcacgagaagaccaatccgaacatcaagacgatccgtccgctgaaggacggcgtgatcgccgatttcaacgctacggagttgatgctgcgcggcatgatcaagaaagtcaagacttcgggcaatctcttcgctccctcgatccgcatggtgatctgcattccttccggctcgaccaatgtcgagatccgtgccgtgcgggattccgccgaacatgccggggggcgtgaggtctatatgatttacgaaccgatggctgcggcgctgggtgccggtctggatgtcgaagcaccggagggcaacatggtgatcgacataggcggcggtactaccgagatcgcctgcatttcgctcggcggcatcgtttgctccgagtcgatcaatgtcgcgggcgatgtctttaccaacgatattcagagttacgtgcgccagcagcacaacatccgtatcggcgaacgcacggccgaggcgatcaagtgttcgatcggtgcggcgctcaccgagctggacgaagagcccgaggattacgtggtaacgggtcctaatatgcttaccgccctgccgcagaccgtgtcgctcagctacggtgaaatcgcctatgcactggagaagtcgctcgtcaagctggatgcggcgctgatgaaggtgctcgaaaccatgccgccggagctgtatgccgacatcgtgaagaacggcatctacctggccggcggcggtgcgcttatcaaggggctggacaagcgtctgaatgccaagacgggtattccgttccacgtggccgaggatcccttgcgtgctattgcgcgcggtacgggtatcgcgctgaagaatatcaaccgtttctcgttcctgatgaaataacgaagctgcggaagctttcccgtgagccgtgtataaactgatcgaattcctgcgcagaatctacgtggcggtcttgttcgtcgtattcgaagcgatcgccatcgggtattatgcgcactcttcgaataatacgcaggccaagctgctcacccgctcgaaccaggtggttggcggggtgaacggcatcttcgcagacattcgctcctattttaccctggggcgcgaaaacgaacgcctgctggagcgtgtcgccgtactcgaggaggagttggctttttaccggaggtcggcggccgattcggtgcgtacggacctgctgcacgatatgggagagaagccctacgagctgaccgtcgcccgggtgatttccaattcgatcaacaagaaccgtaacttcatcgtgctggaccggggcgaacgcgacggcgtcgagaaggggatgggcgtgctctctccggaaggggccatggtcggctacgtggccgccagttccgaccgtcatgcggtggcggtgtcgattctcaatacgtcgttcaatgccagcggcaagctcgccggcgacgactatttcggctcgatctactgggcgggtgacgatcgctaccacgtccgcatgaaggaattgtccaaatatgcccgcgttacggagggggaagaggtggtttcctccggtttttcgcagtattttccggctgacgtgctgatcggctatgtggagagtttttcgctggccgatacccagatggcttacgacgtggtgatccggctggcggtggatgtgtcgcaactgacggatgttatcctggtgcgcaaccgggatatcgaagatgtgcaggagctcgaagccgaagccgagcggcaaaacagaagataaatatgtaccggactgttccctatatcgtcttattccttattttggccctgttgcagatttttctgttcgacaacctgtcgatcagtatctacctctgccctttggtctatatcggcttcattgtcctgctgccgatcgacgctccgccggttgcagtgctttttctggctttgtcgatgtccgttgcgatggattgggcgatgggggcagcggggatcaatacgatcgctacgcttccggtcgctatgctgcgccggccgcttctgcagtctgtctgcggtaaggaggggattcgggagggtggtattccttcttcgatccggttggggcagggcggatttctgcgctacctggcagcgatggtcgtggtacaccacttcctgtttttcatgttggagtccctgtcttgggcgcagttgttccatacgctcgtccgactggtcgtgagcggtgctgttacggtgggcttcatctggctgcttgcgcggctgttcaccactaaactgacggttcggctatgagttacggtggggaaggggttgcccggatgcgggtgctgcaggtggtcgtgctgatcgttttcggcgtaatcgccgcgcggcttgcttatattcagctcatcgacagcaaatatgaggagctggcccggggcaatgcgttgcgctacgaagttcagtatccgtcccgtggcgaggtgttcgaccgcaacggcgaatatctggtacagagtcgcgagtgttatgacttgatggtgatctatcgcgagatggatcgggaggggttcgatacgacgcttttctgtcaggttacggggctttcgcgcgaagggcttgtgagggagctggccaatgcccgtgtgcgtccgcgtgcgccccgtatggtgatgaactatatgtccaaggaggacaaacttcgtttcgacgagtgtaacttcgccggcttctataccgtttaccggactgcccggcaataccctcgtaaagtagggggaaacctgctgggatatgtgggggaggtcaattccgaaatgttgcggcgttatccttcgtatcaggcgggcgaatacgtcggaatcagcggcgtggagtcggcctacgagccggagctgcgcggtaagaagggggtgaagatctccgaggtggatacgcacggagcgatcaagggttcgtatatggacggtcgtttcgattcgctgcccgtacccggcaagtcgatcgtctgcacgatcgacgcgcggttgcagctcttcgccgaggagctgatggccggcaaagtcggggctgccgtggcgatcgaaccttcgacgggcgagattctgatgatggtttcctcgcccacatacgatcccgatgaactggtgggacggcagcggggcaatcactatatggagctgctctataacaaacggcagccgctgttcaaccgtgccgtaagcggccgttatccgcccggttcgaccttcaaactggttcagggcctgatcgggatgcaggagggtgtgctgactccttccatgcgttatccctgtcacgagggttatcaggtcggacggctcaagatgaggtgtcacgcccatacgtcgcctgcggacctgcgttttgccatagcgacttcgtgcaacgcctatttctgttacgtattccgcgatattctcgaaaatccccggtacggaagcgtcaaggaggggttcgacgtatggagggagtatgtcgagagtttcggcttcggccgcaagctggattcggattttctgggcgagggaaacggctatgttcccgaccggaagttttacgacaggcgttatcggaaatcgtggaacgcgctgacggtgctgtcgctctcgatcggtcagggggagctggagtgtacgccgctgcaaatggctaacctggcggctatcgtcgctaatcgcgggtactattatatcccgcacatcgtccgttcggtagaggggcgggattcgatggaccggcggttttacgagaaacattatacgaaagtcgatccgaaatatttcgaaccgatcgtggagggtatgtggcagagcgtgcacaaggagggcggaacctcccggacggcttatctgccgggtctggacgtgtgcggcaagaccggtacggcgcagaatcctcgaggcaaggatcattcgaccttcctgtcgttcgctccgaaggacaatccccgcatcgctatttcggtgtatgtcgagaacggcgggttcggggcttcggccgctttgcccatcgccagtctgctcgaagagtactatttgaccgacaccgtcacacggccctggctggtggagatggtcaagcagaaaacgatttattacccggcctatggaaaataacggcatcggtaaattgttcgagggcgtcgatcgctggacagtgctgatctatgtgctgatcgtgctggtcggcttcgtggctatcctctccgcttcgtacgaagagggggcggagagcattttttccttctcgcatttctatatgaaacagctcgtctggatgggaatatcgttcgccgtagcggtcgtcgtgttgctggtcgatgcgagcatctatcacaagtgggcttatctgttctatgtcctgggattgctgaccctggtagccgctctgctgttcggtcgtgaagtgaacggtgcgaaggcctggttcgagatcgggtcggtccgtattcagccggtggagttcgccaaaatcgctacggcgttggcgctggcccgcgtgatgagctccagctcgttttcgatcaaccgggcgggggatcttttcaaggtgggattggtgatctgtctgccgctgttgattatcgtcatgcagaacgatacaggatcgggtatcgtgctcgtatcgctgctgttcgtgttgtaccgcgaaggtttgaacaagtggctctgtattccggtgatcctgatcgccgtactctttattttttcgttcctctttacgccgctgaccctgttggtgatgctgattctggtctgtacgctttccgaggcgatgatgaacggacagtggcggtcccgcatggtttatctggctgcgctggcattgggcacgctgcttctctatttcgggatgctgttggcggctcccggagcgatggatctctaccgctgcctgctcgtggtgacgctgctgtcgctcatctttgtggcgatttatgccttccgcgccaatctgcgcaatattttcattacgatcggactgtttctgacggcaatgcttttcgttccgactaccgattatattttcaattccatcctcaaagagcatcagcagaaccgtattttaagtttcctggggctggtcagtgatcccctcggtacggattataacgtcaatcaggccaagatcgctatcggttcgggcggctggatcggcaaagggttcctgcaagggacccagatcaaatacggtttcgtgccggagaaacataccgatttcattttctgtaccatcggcgaggagtggggatttctgggcgctatgcttctgctgacgctcttttgcctgttgatattccggttgatgcgtatgggcgaacggcaggaggagcctttcggacggatctactgttactgcgttgcggcattcctgctttttcatctgctcgttaatgtggggatgaccatcggactgatgccggtgatgggaattcccctgccgttggtcagctacggtggttcgtcgctcatggcttttaccatcatgttgttcattgcggtccggctggatgcctcgacccggcaatattcttttcgataacattcacaaccttatttatatatccgactgactttatgaaagaacatcaacacagaggtttgacttccgcccaggtggaggagagccgccgtctgcatggggataatctcatcacgccccgcaagggggattcggcctggaaactgtttgccgagaagttccgcgatccgattattcaggtattgctggtagcggcgctgctgtcgctggcgatggcttttatcgatggggagttcctggaaaccatcggaattatctgcgccatcgttttggccacttgtgtcggctttttcttcgaattggacgccatgcggcggttcaagcggctcaatctggtgaatgacgacattccggtcaaggtcgtccgcgacggggagatgaccgaggtgccccgacgcgatgtggtcgtgggcgacctggtgtatgtcgagaatggcgaaacggtcccggcggacggtaagctggtgaaggccgtatcgctcaagatcaatgaatcgacgctgacgggcgagcctgaggtggacaagactaccgacgaacgctttttcgatgccgaggcgacctatccttccgatgcgctgttgcgcggtacgaccgtcgtggacggttacggcgagatgatcgtcgaggctgtgggcgaccgcaccgaagcggggcgggtaaccgagcagtcgtccatagccagcgaagagcctacgccgttgtataagcagctgacgcgtctttcgaggatgatcggtaagatcggtattgcagtgtcgattgcgatcttcgtagcgatgctcgccaaggcatacctgggcggcgagctttcgacgggcgattgggtccagacttccaaggagctgctgcgtatttttatggtttcggtggctttgatcgtgatggctgttcctgaggggctgccgatgagtatcacgctctcgctggcgttgtcgatgcgtcggatgttgaagacgaataacctggtgcgcaagatgcacgcctgcgaaacgatgggggccgttacggtgatttgtaccgataagaccggtacgcttacccagaaccggatgcgggtcgaggagatcatccattatgcgtccatcgacgaacggttgctggccgagatcatcgccgtcaattcgaccgcttttctcgatgccgacgcaaatgtcatcggcaatccgaccgaaggagccctgctgatccgcctgcgggaagagggattcgactatgcggctttgcgcgaggaggctccgatcgtcgatcgtatgacgttcaccaccgaacgcaaatatatggcgacgattatacagagcaaaaccactggaaagcgtttgatttgcgtgaagggtgctcccgaaatcgtacgggcgatgtgtatgccggatggcaaggacgcccaggtgaacgaacagttgctgctgtttcagggacgtgcgatgcgtacgctggcggtggcgtatgccgaaacgacggccgaacgatgcgaagacgcgctgcgggatccgcagatgctgttcgtggccgtggcggcgatcgccgatccggtgcgggaagatgtgccggctgccgtagcccgttgtatgaaggccggaatcgacattaagatcgtcacgggcgatactccggccacggcccgtgagatcgcacgccgcatcggtttatggcacgatgaaaccgactcctcacggaacgaaatgacgggcgtggagttcgcggcgatgagcgacgaggagctgctcgagcgggtgcaggctctgaagattatgtcccgggcgcgaccgctcgacaagcagcggctcgtgcgtcttttgcagcgcaagggcgaaatcgtggctgtaacgggtgacggtacgaacgatgcaccggcgctgaatttcgctaacgtgggactctcgatgggatcgggtacgtcggtggcgaaggatgccagcgacatcacgctgctcgacgattcgtttacgtcgatcgcatcggccgtgatgtgggggcgttcgctctaccgcaatatccaacgtttcgtactgtttcaactgacgatcaatttcgcggcgatcatcgtggttttcgtaggttcgattttcgggaccgagatgccgcttacggtagtgcagattctgtgggtcaatatcatcatggacactttcgctgcgctggcgatggcttccctgccgcccaatccggcggtgatgaacgaaccgccgcgtcccaaagacgagtttatcatcacaccggccatggcccggacgatctttacctgcggaacgattttcgtcggcgtattgctcggtatgctgttctactggcgtgctacgaccggcgagctcagtctcgaacaactgaccgttttcttctctgtattcgtctttctgcagttctggaatatgttcaacgccaaaggcttcgaagcgtgccattcggtgctgcacgatctgcggggaagccgtacgttcttcttggtgctgctgttgatcgccgtcggacaggtattgatcgtggaattcggaggtccggtgttccgtactacgccgctcacgtgggtacaatggctcgaagtgatcggctatacctctctgatcgctattctgggcgatgtcgtgcggagtatccgccgccgcatccgtccccgtcccggctgtcggtaagcggtgagaacaggtttttccgatgcggtcggaatcttgtatttggtaaatgaagaaattgctgttgctgtgccttctgctgggggtgtcgatcggcgctttcgcccaggtcgatacattgagtccgattaccccccccctccgccgcagcccgtttatccgggatatggagcggataacctcttcgcgtgcctaccggataacctatatcggtgttcctctcgtcgttgcgggactcgtcgtgcaggagcgggatcatggatttcgtcatttgagaaacgattatgtgccctccttccgatttcgttacgacgattatctgcaatacgctcccgcagcgttgatgctggggctgaaaatcggaggagtccgggggcgcagttcgtggggccggatgctggtgtcggatgccttttccgtcgctctgatggccggagcggtcaattctctgaaatatacctgccgtatgccccgccccgacggatcgaacaacaagtcgtttccgtcggggcatacggctacggcttttatggcggctacgatgcttcataaggagtacgggggccgcagtccctggtacagtatcgccggttattcgatggctacggtgacgggtgtttcgcgtatgttgaacaacaagcattggctcagcgacgtgctggtaggtgcggggatcggcattcttggggtatctgttcgccgatttgatcttcaaggacaagggcttgacggaattcgagcaggattttttttacgaccgttattgccgaccttcgttcttcggtatggaggtaagtacggaggtggtgatggggcggtaccgccctgtttcgggggtcgtggccgaattcaatgcaggcgtgaacctgggaatcgagggagcctggtttatgaatccttatgtcgggttcggaggacgtacggccgtatcgagtgtgccggttacactgagtatcgccgaatcgacggaccgtctggacagttggtccgcaagtgccggggcctatttttcatatccgattaccgcgcgttggcggaccggtggcaaggttttggccggatatcagtattatgaatctttttccttggacggatatacgctgggaggccatggaggacccgttttcggagtcggtacctctatgacgtttcgggccaattacaacctcgatcttcgatttcagactacttactatctgcaacctccgatggcttgcgggagtcgtcagcaccttaatacgctgaccttgggcctgtcggcgaatatcgccttctaactcgtgcgggtccggaaccgcgattcttcgaaacggataaaatgaaagaggtgcgaccgaaggccgcacctcttttcgcatgagaggaacaggattacaatacaccctgctcgagcattgcctgagcgactttcatgaagcctgcgatgttggcgcccttcacgtagtcgatgtgaccgtccttctgcttgccgaacttcacgcaagcgtcgtggatgcttgccatgatgaagtggagtttctcgtccacctctttgcccgaccaggagatgtgcatgcagttctgcgtcatttcaagacccgaagtagctacaccgccggcattgactgccttgcccggtgcgaacagaatgcctgccttctggaatgcgtggatagcttccggcgtacaacccatgttcgaaacctcggcgcagcaccaagtgccgttcttcagcagttcggcagcatcgtcgccgttcagctcgttctggaatgcgcagggaagtgcgatgtcgcacttcacgctccaagccttcttgcccggagtgaaggtcgtacctgcgaatttctctgcgaacggagccacgatattgcggttcgaagcgcggagctcgagcatgtagtcgatcatctcctcgttcataccgttggggatcgttactacaccgtcgggaccggagattgcgatcactttggcgcccagttcggtagccttcttcgatgcaccccaagccacgttaccgaagcccgagatggcgatctttgcgccttccagtttcttgccggccagatgcagcatgtgctgtacgaaatagagtgcgccgaaaccggtagcctccggacggaggatggaaccgccccaagtttcgcccttgccggtaagaacgccggtgtggtacttgcgagccagtttctgatacataccgttcaggaagccgatctcacggccgcctacgcctacgtcgccggcgggaacgtcggtatcgacaccgatattgtgccacaattcaagcatgaaagcctggcagaaacgcatgatttcagcgttcgacttgccggtcggatcgaagtccgaaccaccctttgcaccacccatcggaagggtcgtcagggcgttcttgaaagtctgctcgaaaccgaggaacttcagcatcgaagggttcacggccttgtggaaacgcagaccgcctttgtagggaccgatcgcgctgttgaactgaacgcggtagcccaggttggtctgaacttcgcctttgtcgtccacccacgttacgcggaaggtgaagatacgatccggctctacgaggcgctcaacgatcttggctttctcgaactcaggatgttggttgtaaacttcctcgatggactcgagtacttcgcgtacggcctgcaggtattcattttcacccgggtgcttacgctccaattctgccattaaattgttaacattcataatatattgaaattaagttgtggtttaatgttgatgcaaagataatatttattcttatagattgtaatttattttgcacgaaaagattactttttcgtacaaagcgattttgtttgtttgaaaaactgaaattgaacggttttttcgagcccggactctcccgtatatactatatggaaaaagttttcgcacggattggggcctgtgaacggggattttggaaaaatatcgttatctttgttgggattaaaccttttttataaggcaatgagttcagacaagtacattttgcaggaggtcgtcgatgcccgtacggagcgggagttcctcgatctgcctcggaaaatctataaggggaatcgtaactgggtatgtcccctcgatccttcgatccaggctgttttcgatccgaagaaaaacgagatgttctccgatggcgaagccattcgctggatcgcacgcgataaaaaaggagaagtggtgggacgtatcgccgctttttacgaccgggaacatgctttcctggaggagcagccgacgggagggtgcggctttttcgaggctatcaacgaccaggagctggccgatcagcttttcgatgcagcccgcatgtggctttccagccggggtatggaggcgatggacggtccgatcaatttcggtccccgggattcctggtgggggctgttggtcagcgggtacgaatttcagcccctctatgagaacacgtacaatccgccttattataaagagttgttcgaaaattacggattccagaactacttcaaccagcatacctatctgcgtcggttggaggtggggcagttgagcgattcggtttacgagcgtgtgaagcgtctggaggagagtcctggttactgtttcaagcatatctcgaaaaagaatctcgagcaggtggccgaggatttccggctggtttataacaaggcgtgggcgctgttttcgggcgtgaaggcgatggaccgcgaacaggcgttccgcattatgaatacgctgcgtccgattatcgacgaacggttgatctatttcgcttactataacgacgaacccatcggctttttcatcatggtgcccgatttgaaccgggtgatcggttccttcaacggcaagttcggctggtggaacaagttgcgtctgatgtgggcgctcaaggtggcgcataaggccgaccggatcttcggcctgattttcggagtcacccccgagttccacggcaagggcatcgaggcgggaatcattcgtgccttcgagaaggaggtgccgaagttgccctacaaatcgttggaacttgcgtggatcggcgatttcaatccggtgatgatgcgcatggtggagagttacgtatgcgccaccaagcacaagatgcatacgacctaccgctacctgttcgaccgcacgaaggagtttcaccgctgtccccggatgggcgtgaagcgccgcgaataagactgataatcaaataactgataattaaatcgataacagacaatgaaaacaacggtttttaccaaacatcacattgcgaacggcgctaagatggccgagttcgcaggttacaacatgccgatcgaatttacgggcatcaacgaagagcacctggccgtgcgcaacaacgcgggcgtattcgacgtgagtcacatgggcgaggtctgggtaaaaggtcccaaggccgaagcgttcctgcagcatatcacgaccaacgatgttgcggcgctttacgacgggaaggtgcaatataccaccatgcccaacggcaagggaggtatcgtggacgacttgctggtttaccggatcgatgccgaaacttatctgctcgtaatcaatgcggccaatatcgacaaggattggaaccatatcgtcgaagagggcaagaaattcggcttggaggccggtcatggcaagcagctctacaacgcttcggacgagatctgccaactggcgatccagggtcccaatgcgatgaagatcgtgcagaagttgtgcaccgagccggtggaggatatggaatactatacgttcaagaagctgaaggttgccggtgtggatgcgattctttcgattacgggatacaccggtgcgggcggctgcgagatctatgtggccaacgaagacggcgagaaactctggaaggctctctggcaggagggttcgaaggaggggctgaagaacatcggcctcggtgcccgcgacacgttgcgtctggaaatgggtttctgcctctacggtaatgatatcgacgatacgacttcgcccatcgaggcgggcctgaactggctgaccaagttcgtcgatggcaaggagttcatcgaccgtaaactgatggaagagcagaaggccggcggtttgacccgcaagctggtcggtttcaagatgatcgatcgcggtattccgcgtcatggctaccagattgcctctcctgagggcgatatcatcggccaggtgacttcgggtacgatgtcgccctgtctgaaacaggggattggtatgggttacgtgaagaaggagttcgccaaggtcggcacgcagatcgccatcgtgatccgcgagaagctgatgaaggccgaggtcgtgaaacttccgttcattcagcaaaaatagtttccgtccgatcggatgattcggggcggctctgcaaaagagccgccccttttttgtcgtatccgtgatttttgcatccgacatcagatctgcgcgtccggtcggagccggtaacgggttatactgagaagcaattccgattttataaggccgtgaaaggcatcggtaaatagggtccggtttttcagccgttcgcagccatctcccggtcgaatatttcgtcgaaaagccgccggagctcttggcggttgcggatcagctcgcgcagtcgtgcgaggcgcagggcattgtccgattccgggatccagagtcggagatagcctccttccgcgtatttatgtgtcaggtgatcgacacagcggcgatattgatcctcgcggtccagctccggatagttcgccagcccgtattgtatcgtgcggcggacgatggtcggcgggtcgatacaacggtcggcttcggcaacgatgcgtccgtaaatcgtgcggggttcgtggtccgacgaggcgcggtggtcttccaccgcctcacgcatgacggcgatctgctgcggcgagaaccactgccgcagttttgtatccgcagcgaggatttcccccgaatggatatggtgcatctcccgtcctttctccagtcccacgtcgtggtaggccgcaattgcgtaaaccatctgccgatcgacctggtaatgccgggccagtgccagactctgttcgatgactgtccgggcgtgttcgggtccgtgggcacggtcgaaatgttcgtaacgggggaggatcgcctgttcgacgtaggcttgcaactctttattcatgtgtttcgtaaaaaaagtcccttccatggtaggggaaagggactttggttgtagaaaccggatggtggtatctggataaatatcctattttgcgtatgccacggatcgggtttcgcggatgacggtgatttttacctgccccgggtaggtcatttcgtcctggatcttcttggcgatgtcgtgcgacaggctttcggactccatgtcggagagcttctccgcaccgacgattacacgcagctcgcggcctgcctggatcgtataggtcttcactacgccggggtaggagagcgcgatgtcctccatctccttcagacgcttgatatagctctcgaccacctcacgacgggctcccggacgggctcccgaaatggcatcgcagacctggatgatcggggcgataagcgacgacatctcgatttcgtcgtggtgggcgccgatcgcgttgcaaacctcgggcttctccttgtatttctcggcgagtttcataccgataattgcgtgcggcaattcgggttcgtcgtcgggcaccttgccgatgtcgtgcaacagaccggcgcggcgggccgttttggggttgagccccagctcggcagccatgatgccggccaggttggccgtttcgcgggcgtgctgcaacaggttctgtccgtaggaggagcggtatttcatcttgccgatcatacggatcagctccggatgcaggccgtgaatacccaggtcgatcgcggtacgtttgccgacttcgacgatctcctcttcgatctgcttctgtaccttggcgaccacctcctcgattcgggccgggtggatacgtccgtcggttacgagctggtgcagggccaggcgggcgatttcgcggcgcacgggatcgaacccgctcaggatgatcgcttcgggcgtgtcgtccacgatgatttcgatgcctgtggcagcttccagcgcccggatgttgcgaccttcgcggccgatgatgcggcctttgacttcgtcgctttcgatgttgaacaccgtaacggcgttttcgatggccgtttcggtcgccacacgctggatcgaagccacgatgattcgcttggcctccttcgtggcggtcattttggcctcctcgatcgtttcgttgatgtaggctgcagcgtcggctttggcttccgctttcatattttcgatcaggatgctcttggcatcttcggagctcaggcccgaaatctgctcgaggcgcgtgttctgctcgtgcatcagacggtcgatctcctccttcttgtgttcgagcacctgaagctgcgcttccatctgctctttgaggcgggcgttctccttgaccttgccttccagttcgcgctgttggttttgcaggttgttttcgatctgcttggcccgctgttcgctttgggcgatcttctggttgcgttcattgacctggcggtcgtgctcgctcttgagctggatgaacttctccttggcctggagaatcttctctttctttatcatttcgccttccgcttccgcctctttccgggcggcttcacgcagtgccttgatggtcttcttggtaacgtatttggttaccaggatgtaaatacccaggcagactacggcggacaggacgctcgatagtacgattgtcatcattgttttagagagttattatttgttagttattagggtttgtgcataaaaaaaccgcatagtattccttaacttgtttgacgaatctgcaagatcagtcaagtgtgggggctcccgaaaatcgcaaccttctaccggcaggccgcagcctgcaccccgaggggttgaagcctgattttgaaagtggtgagttgccccaatgtaaaaattgttcagtttcgcaaagctttaaggaatctatgcgggtagatttttcttaaacgtatggtaaagaacgatgatacttgcggacttttctatacggtcccccctcgtatccttccctgttatttcttttcggtttcgattcggttcaggtattcgtcgatctcgtcgcgcagcgcttccagcctgcggagatcttcgctgcccacttctcggctgcgggccagcgaaacgctcgaaatcgccaactgcaatgcggccatcgccaggcagtcctgtgtcgagaatccttcgtatttggctttttcgaaccgggtgacataggcattcacctcgcgttcggccaggcggtagagctcctctttctccgccagcgactgttcctcgttcgcttcgtgcttgagcgtaaacgagtaacttttaccggctattttgagctttattgcctgttgctgggccatgtcgcttgcttcccgttaaatgaaatatcttcggtcgttatcgtatgtcttgcctacttgcccgacagctcttcgccgattcggtcgggtttgttgagtagggtgatgcacttgtccacctcccgcattaaacggttgacgcgtgcgatcgctttgctttggtcgggtgcatttcctgcgagtccctggctgagctgtacgcgggcgagctccttgccgagctcttttacctgcatttgcaaatcgcggttttctttacgcaagacgtcgcgctccgccgctgtttccttgcaaagggccgtaagccgacgatggtcggcaatgagctgccgaatctgcgcctcgaaatcgcttatgacctttttctctgccatttatctgtcgccggaaatattttccgccttcccaaaggtatataaaaaacgtcaaacgacaaaattttatttcatgatcatatcctttcgtgtcccccgttatgggaagcgtagcggcccaattcccctcccgggaagggaattaggggtgaattgcggacacgaccggaggccgtgagttagcgaccgtcggattcgatcctgcgactgtcggataacgctacattgaaagatgtgatgattgtcttttatttcgtttcgagttcgccgtagaggtcgtagtcttcggctgcggtgatccgcacctgatagaagcaaccgcggatcagcctgcggcctgcggccggaatcaggatctcctgatccacttcgggcgagtcgtattgcgaccgtcctacgtagaaatccccctgccgggagtcgatgatgacccgctccaactgaccgatacgtgcccggttgttttcgagcgagatctcattctgaagcgccattactcgttctacacgactttgtttgacctcttccggaacatcgtccggcagattccgggccgaataggttccctcctcttcggaataggggaatacgcccagtcgttcgaaccgtaccgtgcgcacgaattccagaagctcttcgaagtcggcttcggtttcgcccggatatccgaccagcagggtcgtgcgcagcgcgaggtcgggaatggcctgcctcagtttgtcgatcagttcgtaagcctgggccttggtatggcgtcggtgcatggccgcgagctggtcgtcggagatatgctggaagggaatgtcgaggtatttgcagattttgggttcgcgggccatcacttcgatcacctcgtcggggaaagccgtggggtaggcgtagtggagccggatccagcggatgccgtcgatgcggcacaaggcttcgagcagttcggccaggcgtcgtttgccgtaaaggtccaggccgtagtaggtcgtgtcctgtgcgattacgatcagttcgcgcacaccgcctgcggccagcttccgggcctcttccagcagggtttccatcggcaccgaagcgtggggcccccgaatcaggggaatggcgcaataaccgcacttccagttgcagccttcggaaattttcaggtaagcgtaatgtttcggggtggtgagccggcgttcggtcgcaagcgctggccggggagtcgcctccagcgcccgaacgatgtcgtcccaatccttcacgccgaagaactcatcgacctcgggcagctcggcacgcagctcctccgcataacgctcgctcaggcagcccacgacgaacagccgttcgattttacccgtctgtttggcggcggcggcccggaggatcatgtcgatcgactcctgcttggcgtcgccgatgaagccgcaggtgttgatgaccacgactttggcatcggtgcggtcgctgtcgtgcgtgaccgtatagcctgcggctgcgagctgggccatcaggtgttccgaatcgaccgtgtttttcgagcacccgagggtgatgacgttaattttcttcattcacgggagattttattttgcttcgctgccgaaaagggcgttcacgaactccttgcggtcgaacatcttgagctggtcgataccttcgccgatgccgatgtagcggacgggaatgcggaactggtcgctgatgccgatcaccacgccgcccttggccgtgccgtcgagcttggtgatggtgagcgacgtgacctgcgtggcctgggtgaattgccgggcctgttcgaaggcgttctgtccggtcgaaccgtccagcaccagcatcacctcctgcggggcgttggggataaccttgcccatcacgttgcggatcttggtcagctcgttcatcaggccgaccttgttgtgcaggcggcccgccgtgtcgatcagtacgacgtcggccttgttcgccacggccgatttcaaggtgtcgaaggccaccgacgccggatcggagcccatctcctgacggatcatcgtggcgccggcccgttcggcccatacggccaactggtcgatggcggccgcacggaacgtatccgcagcgccgatatagacgttgaggccggcccgggtgagctgggccgcgagtttgccgatcgtcgtggtcttgccggcgccgttcacgccgacgaccatgatgacgtaggggacgccttcctcgacgtcgagtccgaagttttcggtcgagcggtgcgactcctccatcagttgggcgatctcgtcgcgcaggatcgattgcaactccgaggtgttcatatacttgtcccgtgcgacgcgggcttcgatgcgttcgatgatcttcacggtggtttccacgcctacgtcggaggtgatgagcacctcctccagatcgtcgagcacctgtgtatcgatggtcgatcgaccggcaacggcccgcgccagtttcgagaagaggcccgttttggtcttctccagaccggagttgagttccgcctgctcccggtcagcggttcgggcagccggctggggagaggtattttcctgcttcgtcgtattttcgaccgcagccggccggtggttttccggagaagtcggttgagatcgttccgccggagtcgtcggctgtgtattctgttttttcttgaaaagatcgaagaatcccataaaatattgttatattagtaatgttgcaaaaatacgaaaagcccagagaaaacgggaacttgttgccagttttccgagaacattttaagactacgtcaaagatagtgaaagataaaagcaatcgtgtgggcttgcacgcaaagattgccgaatcgcttcctgtcttctgcaaagatagtacaaccagccggcggagccaaatttttttgagcgttgccgcgttggagtatttaggcaaagttagagatacggataaatcgggtggtgcaaagcgaatttattcccgttttgtcgaggcgaagaaccgcaagaggaacgaaggtacgaatgattcctcgatgatcggtgctgttctgccgggttgcgggtcggtgaaaatacaaagggcatccgttgaggatgccctttgtattaagcggaatcgaatttttaggttgttttccgaatccggtccggcggatgattctttccggccttgcgatccgaaaacattcgtttcgcctaatgcattgcatttatttcttctcggcgaaaaagtctttcacctggtcgttggcgatgatgccctctttgaagatgtatgcaccggttttgtcggatttcaccattttgatacatttggtgaactgtttgcccgtaccggttttcagcgttgcgactactttctttgccatatagcactaaaattatttgatttcacgatgaatggtcaccttcttcaggaacgggttgtatttcttgcgctccagacggtcgggggtgtttttcttgttcttggtcgtgatgtagcgggacattcccggaacaccgctagctttctgttccgtgcattcgagaatcacctgcactctgttgcctttctttgccatttgtcacttgagttttagtaaacctttttgggtgcggcagcttcgcggagcgctactgcgaggcccttcttgttgattgttttgattccggcggcagataccttgagggtgatccagcggccttcctcttcagaccagaagcgcttgttcttcagattggggctgaacttgcgtttggtcttgtggtgcgagtgggaaacattgttgccgatcaccgctaccttgcctgtaatttcgcaaactttcattttggttaaaatttaattgtaatcccatttcggggagtgcaaatatacaatcttttggccaaataacaaaacaccggcctgaaaaagggccggtgtctctgttttcgggggtcctgacttaccagggaattgcgacagggtctttcttgaaattttcggtcgaaacactgtttccgggcgtttcgggattcagatatagcgtactgttgaatggcgtgacgaagagttgttggctgtcggcatagcaaatgagcacgccgattcggatcgtgccttccgctcggttgtacgtaccgtgctggtactcttcgccgccttggatgttgaagtcgttgccgacgctcattgctccgtattcgttgtgaacgatgccgagttggcacacttcattgacgacttttacattgttcgggtcggtcgcatccatatagaaataatacggactgccggacagatcgctgtatatgccgctggccgcaagttcggggatccgggagacggagaaggcgtcggtcagacggaagaggtcgcgatcggcgagtttttcgactttaaggttcgtaatattgatcacgttcgacaaggaggggatgctttggttgaagaagaagccgcaaacgaacgtggcttcggaggaaacggtgatccattcggcagaaggatcgacgtacggttcggtcgcaattatttctttcttgagcgtagctttgcctgctgcgctggagaccgaaattagcataacgaattccgtttccggcggaagcgaaatgtattggagtgtatatcctccgttgttggcctgctctacctgctctgccgtccatgcattgccgtactttgcgatcaactcttcgtctattccctcccggctgaatacattgtcgtaatcgcttttgaagaagagtgcggtaaggatgccggatgcgttgctggtggtggtaagtacatcgatcgtagtgctgccggccgaagagacggtgacattcacttcgggagccgggcctgtggcggccggagtgtgaacgggaaccggggcggggattacgccgacggattgggtgccggagaaataggcggccaagacgaggtagtcgttgtcttcctgtacgggctgcatcgagtttacggctcttgcctgggttgcagtctcttcgtaacggccgttgtcgtcggtcggaatggtggcggaataggccgcgaggatttcggacgtgagtttttgcggattgtcgaggtaatattcctgtgcgatgaaatgatcccacatcgctttggtgacgagcagggtccgcaggtcggtcgagggattaccttcgatattccaggtaacggagttcgccgcgatttctcctaaagtgaccgtaagcgctttgtccttttcgaacgcaatcggttccatcgacttgagggtcgcacgctcgatcgagacggagttatgcgtttgccggaggcaggtgttgccttcgctgtcggtaagcgttacggtgaatccttccgtgtattcggctgccggcagcgcgaagtagaaataggtcggagagttcgcatcgagtcgtacattctccgtgcaggtcatcgtgacggaggtgctgacgaattgtgcggaaccttcgccgggagcgaaatcgaggctgccggaagccagatcgcttttcgagatttcgaagtgtccggcaatgggttctcccgcattgcccgacagcataaccgacgcgatcgacgcatcgccggtcactcctatgcggagtaatccgccgatatttttgaattccagcgaggtggatgtgctgtatgccaccatcggattgcctcctgtcgtgtaaaacgagtcgggagtatggggcacttcggggcggaagtaggcttcgacgacctctcgctccgggatatatccgccgttgtccggagagtagagagccacgtactcttcggcggtgtccacattggagatcgttgcgcgtgtcggatcattcggatcggggattacgggcaaattcgtgccgttgatttgtacaatatcctcttcgctccagtggacgtaggtttcgctgacgagcgtcgtgcgggtgcggggcgtcgagagagtaagggttaccttgctgttttgttcgtcgtttccgggatcgtccgttcttcccgggttttcggccggagacttggtacaggcctgaagagccagggcgagggtgcaaatccctgtgagcaaatgtaagaatcttttcatgggttttgttttttgatggttagacttgtcggtttttcttttcgggaataaccgatgtatatcatgtgctcggatcatttcggggcggtgtgcgccggtccgtatcgatcggctttccggtgtcgttcgatcggcctcgaaatctgtttgccgggaggactttcgttcggggcttttgacggtcgggaatacggatgctattttgttgcagcaaagatgaagggagcaggcgtatattgctctctcatttcgtttatatcatttctcaaaaagtatatttgtcgaaagatcccgttttcaaggccgttcccgtgtttccgaaaatcgtgcggatagaggggcggtgggaataactgggtgattttgtcgctgaccgggaggaagaatctgttcgggaatagcttcgaatttcggttttggaaggcgaatgtttgatatatagcggtatgaggtgcccgtaattacggtcggagaattaactcttttcgacggggtgtgttcaatgatccgcctttgaatttcatcggacggtgctagtgatcgtatcgggcttttgtttcgcgattttcgggggcgtccggccggacagcgtatcggaaagggttggatgcgttccgggaggaacggggcttgttccagagacggggatatgaagacttccggaacctttcaaggctccggaagtcagggggctttgggaagtgtcgaaaccgggttattctccggcggcatcccgttcgatttcgtcgcgcaggagcgcgagtgcgaaggcgctcgcccggtcgataacctgtccccggtcggtgccgcattgtttgagcagggtcacggtacggtgcgggccggctacggccatccagaccgtgccgacgggtttctgttccgtaccgcccgcaggacctgcgatgccggtggttgcgacggcatagtcggctccggtgatgcggcgtgctccttcggccatctgccgtgcgacctcctcgctgacggcgccccggctggcgatcgtttcgggatcgacacccaacaggttgtttttggattcgttgctgtaagccaccactccgcacaggaaataggccgaggctccgggcattgccgtgaagcgggccgcgatgctgccgcccgtgcagctctcggccgtggcgagagtctgccgacgctgcgtcagcaggttgtggacgatctcctgcatggtcgcccgctcgaatccgaggacgtagcggggaatgatgcgttgcagggcggcgaattgccggtcgatttcgtgcgatacgctctcgccttcgacttcgtaggccgacaggcgcagccgcaccacgccgggtgcgggcagatatgccaggtggaggtacgggggcagggcattttcccagtcggcgatcttttcggccagcatcgattcggccagacctgccgtgatcagcgtgcggtgtacgatctgccgcagggagaaacgggctttcagacgaggcattacctcgtcggtcatcaggtgctccatttcgaaggggacgcccggcagcgaaaccacgaccttgccgttctgttcgaaccacatgccgggggccgtgccgtgggcgttgaaaagcacggtgcagcacgccgggacgagcgcctgatcgcggttcaggcggttgtattcgattccgcgcgcttcgagcatgcgccgcacgtggtcggcgacggtttgatcgcatacgagccgggagccgaagagctcggcgagggtctttttcgtgatgtcgtccttggtggggccgaggccgccggtcaggatgactacgtcgctctggttcatggtccgttttacggcctcggtgatctgctcgcgctggtcgccgaccgatgtgcgctcccagacgacgatgcccgcattgttcaggtgacgggcgatcgacgccgaattggtatccacgatctgcccgatcaggatttcgtcgccgatcgtaagaatagatgctttcatggtggtaagattgaattattttcccggcgcgggcgaagcggaggcttcggacgctgcgtcgtcgatcagggcccggcagatctccttgaccagggagggcccttcgtagatatatcccgtgtatagctggacgaggctcgcgccggcggcgagcatggctttcacatcccgggcattcatcaggcctccgacgccgatgatcggataggctccgtgcgaacgtcggtggatgcggcgcactacctcgatggcccgctgcgtaaggggagctccgctcaatcggccgctgccgatttcgtcgagcgtctcctcatcggtttcgagacctttgcgcgagaaagtaccgttcacggccacgatgccgtccagcggcgtagaaagcatcaggtcggtcacttcgtcgataagcgggtccggcaggtcgggcgatattttcagcaggatcggccggtactggttctggccgcggcgaaaatcgaagagcggctgcagaatattcatcaggtgggctttgttgtgcgatacgctgccgtccgcacagttgtcgcagcagacgttgatcgaaaaataatcgacgtattggtagaggttgcggaacattttgaggtagtcggccgcgacctgcgaaggttgtgtcagcgtgtttttgccgatgttgcctccgatgatgagccggtcgtgccggtggcggagctgggcgatggccttgtacaaccccttgttgttgaggcccgaacggttgatgatcgcccggtctgcgggcagccggaagatgcggggtcggggattgccggcctggggttggggcgtgaccgtaccgatctcgacgaatccgaagcccagggccgaaagttcgcggaacgcttctccgttgcggtcgaaacccgccgccagaccgatcgggttgggaaaccgaagtccgaatacctcccgttcgagcgaagggtgctcggtgcggtagatggcacgcagcagcgcccgtccgcccgggattttcccgatcatgcgcaacaggaacaggaccgtgctgtgagcgcgttcgatgttcatggcgaacaggatgggtttgatcagtttacgatacataatgggcggtgcggtcgatttcggccgcaaagttaagaaaaaagcatctaaattgttaaaaatattcttcccggtagcggtattcgttgcgtatcgtttcgaatttttcggggttctctttcagccgcctgctttcggcggcgatgtcgaagcggtcgtctatcgtgtcgcaaagctcctgccaggagatcgcccggggacgggacggagcgatgtttgacggataccactccccgagcggcagtccgaagtaccggctgatcgtccggacggacagggccgttgcattggccttgccctgggcggaataaccggcgatatgaggggtggcgagcaatgcgttccgcagcagtggcgggtcgaggtcgggttcgtgttcccagacgtcgagtacgtattgcaaaccgctttcgcgaagcgcctgcccatcgaccacctcgccgcgcgaagtgttgataaggatgctgccgggcttcattcgctcgaagagcttcgccccggccatgtgccgggtcgtatcgtccagcggagtgtggaaggtgaggatgtcggcctggcacgccacctcttcgagcggcaggaatccgccgtgctcgcgctcttcgcgggggggatcgcatgccacgacgcggaatccccacgtccgggcgtaggcctcgacgagcgacccgacgtgtcctacaccgacgattccgagggttttgtccgtaggttcccaggcctgtactcgtgagaggcggaccagtgctgcggcgacgtattgcagtacgccccgtgcattgcatcctgcggcggtcgctacttcgatgccgtgtcgccgacaatattccgtgtcgatgtggtcgaagccgatggtcgccgttgcgatcagtttgacggacgatccttcgagtagggcggcgtcgcaccgggtgcgggtacggacgatcagggcgtcggcatcccggacatcggccgttgcgatggttttcccggggaggtattccacccgggcataaggttcgagtactcctttcaaaaaaggtatggcattgtcggcgacgattttcacgacggtattcgaattggttaattgcggagcaaagatagtgcagggcgagggcggcgccaaatttatttgagctcctttttacgggaaccgtgcgccggtgcatacggctcccgcttcgggcgtcgtccgggtcggccggtcggcaccccgttaaaaacggggtttatcggtgataacgatggcggaaaatcaaaaatttactatctttgtaattcttacaaggaaagactatggatctgaaaacattcaatcccaacggggtgggggtggacaacggcgcttattacggtttgccgttcacgcccgaggaggctgcgctggtgcttgtttccgcaccctgggacgtgaccgtatcctacggtgccggaacggctttggcgccggatgccctgatcgaagcctccacacagctcgatctttacgatgcttcggcgccgggagcctggctcggaggcatcgctacggccgacatcgactattcgctgcaggaggagtcccgcaagctgcgggccgatgccgaacgggtgatcgaacatctcgaagagggcggagcgccggacgacgaacgtatcgagcgccgtctgcgccgtatcaacgaaggctgtgcagccatgaacgacaatatttaccgtcaggcccgccagtggctctcgcaaggtaaggtcgtagggctggtcggaggcgaccattcgacgccgtacggcttgatccgtgccgttgccgaaaaggaaagttcgctgggaattctccatatcgatgctcattgcgatctgcgtgaggcgtacgagggattcgaattttcgcacgcttcgatcatgttcaacgtactgcgcgacctgccgcaggtacgcaagctcgtgcaggtcggcgtgcgggattattgcgatgccgaggccgaaagagccgcttcggacgggcggatctcgatgttcgattcgcgctcgctcgctcgcgccggattcgcgggaacgacctgggccgaaagctgccgccgcatcgtggacgagctgcccgaggtggtctatatcagtttcgacatcgacggactcaccatcgaacattgtcctcatacgggcactcccgttccgggcggcatcacttttgaacaggtggtttacctgatggagtgcgtggccgattcgggccgccgcatcgccgggttcgacctggtggaggtcgttccctgcccggaagataagatcgacgcggtcgtaggagcccgcgtgctctacaaattgtgcggcctggccttgcggacttcgtcggcaggaagaggttgattccgacagggcgtgaattctgccggggaagacggtttattttggattacgaatataaatatgaatagacaatgaggcttttttccatgtaccgctgggtccggcaacattatcagtttcagttgcgggggcgtcgttttctggaggctccctggtcgggcggactggtgttgctcttcagtgtcgccgttgcgatgctgctggccaatcttccctggacggcggagtattaccagcgggtgctcaacatcgacatcgctttggtggtgcgtggtcccggcagtctgatcgactggatgtttcccaggggcctgaccctccagaccttcgtcaatgacgggttgatggtggtgttcttctttttgatcggtctcgagatcaaacgcgaaatcgtcatcggacagctctcttccgtcaggaaggcgattctgcccgtgttggcggctttgggcggtatggtggtgcctgcattgatctatttttcgttcaacgcgggaaccgtcgcggcacccggctggggaatccctacggcgacggacattgctttcgccatcggcatcctttcgatattcagcgatcgggtgcctatttcgctcaaaattttcctgacggccctggccgtggcggacgacttgggggcgattctggtgatcgcgctgttttacggcgaggaggtcaatctgttgctgcttgcgattgcgatcctgatcctcgtaggcatctatttcctgaataaagtgggcgaaacccgcattatgttctatctggtaccggctttcgtcgtctgggccctgttttattattcgggaatccattccacgctgtcgggcgtggtgatcgccatgttcatcccgatgaaaccccgttatagcaaggagtatttcgcgcggaagatgagcggtttgtccgatgcgctgctgaaagccgagtgccgggccgacgattttccgaacgaggagcacaggtactacctgcggatgatgtcctcgctggcgaccgattcggtagggatgagcttccgtctcgaacatctgctggctccgtacgtaacatttttgattatgcctattttcgcattcgccaatgcgggtgtctcgatcgattcgctggagtacttccgaatcttccacgttacgccgcaggccggtgcggtcggcacgggcatcttcttcggattgctcgtgggcaagccgctcggtattttcctggccagttggctcgccgtgaagacgaagctggccgaaatgcccgagggagccggctggaagatgcttttcgcggtggcttgcctgggcggtatcgggttcaccatgtcgattttcgtcgatacgctggcctttgccgatgccgagatcgtcagccggggcaagatcgccattctgatgggatcgttcgcgtcggccgtattgggtacggtgctgattttcctcttttccaaaaaaaagacacgtatatgaagaaatatcggttgatcgccgcagcgggactgttcctgctgggtgcctgttcccggggaacggggagcatggagttgcgtaacgaaacggattcggtcgcttatgtgatcggtctgaatgtgggatataatttgcagcggatggattcgaccctcaacgtcgaagccgtgtgccaggccgtgcgggacgtatatgcccggacggcccggatgacgcccgacgaggcccgtgcggtttatctgcgttacgtgaatgtttcgcagcccgaacagattcgggcctatgaagaacagtttctggaggatttccgcaagagcaatcgctcctatgccaagaccgatacggggctgacgtacgaggtgctggagatcggtgatgagtccaagacgccccgaagcgaccgggatacggtggcgatccgttttgtggccaagacggtcgatggaaaggtcgtcgagtcttcgtacgaacgaggagacaccacgcgcacggccgtgggcgatctgatgcccgggttgcggcagagcgtgcggctcgtcggggaaggcggtcgaatgaatgtatggataccctcccgcctggcttacggggccgaaggcgacaagaaattgggcgtggtcccgaacgcgacgttgttctacgagatcgaactcgtcgatgtccgctgacttctttttcaagagggggctgaaaaataaaatcggctgcccgtaaaatattttatatatttgtgcagttatcgaaacggaaataacaatttaatacataattatatcaacaagatgaaaagaacattgtgtttcatggcactgttagctggtgccgtaattttcgcctcgtgcagccgcagcaacggttcgatcacgatgggcagcaagtcgcagttcgactctttgtcgtacgctttgggtaataacgtcggagcgggactcaaccggatgatgtcggatattcccttcgatttcgacgcgatgaccgaaggtgtgaccgaaggtgccctcggaacggcaaaaatgacgcatccagaggcactcgatacattgcgcacgttctttatggttacgcgtccggaacgcgctcaggctattgccaagaagaacgcgatgactcccgattcgctgaagacacccgaagagtcgttggccgatcccgcgatgttcgagagcgaggaggagcgtcggttcatttcgtatgctttcggtatcgatctgggtaacaatatgctgggagcagaccttccgattcagttggtttggttcggtcagggtttgaaagacattaccggcaacggtgaagaagcccgcatgaccgagcaggaagcagtcaaattcttgcggaactggtattcggtggttcgtcctgccgagaacaagaaagccaatgaagagtggatcgcttcgatcgagaagaaatccggcgttcagaaaaccgaatcgggattactttataagatcgaaaagaagggcgatgagaccctgatgccgacggactcccgcgaccgggtaaaagtttattatacgggaaccaattataaggggcaggttttcgacagctcctatttcgagaacaagcccgaagagatgaaggagtacctcaagcagatagatccggaaggttatgacaaggacgaagctgtcgagttcgaattgggacaggtgattcccggctggaccgaaggtttgaaactgatcggcaaaggcggtaagataacgctttggattcctgcggaactggcttatggtcggcaggcgcgcggtaagtatatcttgcctaattcggctcttaaattcgaggtagagttggaggatgtgattcctttcgttgaggaaacgaccccggcaacaacggatgaagctgcggctgcgacgactcaggcagcgaactctgctcttccggtgaagaagtagtcgcctcccggggaccgaaaaatagccgacctttgtagggtcggctattttgttgttttagagagcggatggcttctgccttcgtgcgtgaaaaattaaaagggcaggtcgtctacttctgctgcgggagtactgtacgatggctcttcgagcggggccgcgtcgggcatcggcgggatcccggcgttttgagcggtttctttgggttgcaggcgccatgcccgcacatcggtataccagcggccgttatattcgcgggattcgacgtttaccgaaaccgtataggtagccccttcgcggagtttggccacgtcgctcggcttgttgaagaacgtgacgcagattttgcgtgaaaattccgagggcagctcgaaaaccacgtcctgacgctgccattctccccgggcggacgtaccttgtgtcaggggcaggattttatatacgacaccttcgaattccataaaaacagtaattttagtagattacaaaagtaatgtttgtgccgcaaacccccaaattttttccgtaaaagttcttttgtcctgtttcgggccggaccggatgattggtcgtgtaccatcttgcgtatgctgccgattccggtcggcagcttcgggacggataaagcggatgtcccctgcgctttttgacgacggtcggagtgtgcggcatccggcgaatgcggaccggtgagaatcgggcgccgaaggagaataaaaaaggattcgccccaggcgaatccttttttattttgaagcgtcaaacggtccttcgaactatttggcggctttcttatcgtagcgttttgcgtaacggctcataaacttatcgacgcgaccagcggtatccaccaacttcatcttaccggtgtagaacgggtgagaggtgttggaaatttccatcttatacacgggataggtttcgccgttcacttcgatggtttcttttgtcgaaacggcggacctgcacaaaaacacgtggtcattcgacatgtctttgaatgccactaaacgataattttcgggatgaataccttttttcatttcgtttgttttgtttgtaattagatgcttaagcggagcaaaggtagtaaattttttccagttagctaattttccgaagaaaaatcttgcgatcgggtcggttagttgttgcggaaaattccggtgcggctgtttttcttgcgatgcaggggcgtaaaacagggaatcgatttgagcgaaacgggtttgtgctggcgtctcgaaatgaaaaaatgggtttttattttgtgaatccggtcgaaattcctatttttgtgtccgtattcggattttcccggatgcaaaaggacccatagctcagtcggttagagcagcggactcataatccgaaggtcgtgggatcatgcccctctgggtccacttgaaagtcagggagttgcacagtttgtgcgactcctttttgttttttctttgcggttttatgcaagtgtaggctggccgtgcgagccatgagtgcaacagttgaagtcgttgttttacaggcttgaagtattcaaacggtaaattcgcattgatgttacgcgctgcgtagggctaaaagcaggtgttcgaacgttgggattccgggaagccctgtctgttagtattttgagaagaatctaccgcctgtatggattaccccgatagagtcgctatttcaaattgattgggtaactttttgcacaaaatcataattttacgtatttttcgaaaaataaaccataaaaatccatagaaacgatgcgagcaaaatacctggggctggatcttccgagtccgatcattgtcagcagttctccctatacctccaatgtcaagagcgtcgagcagtgcgctgcgagcggtgccggtgccgtagtgctcaaatccatattcgaggagcagatcctgcaccatgcggctgcgctggacaccgtatccgattcggcttacggcgatgcggaggtttatttgcagcgttatctgggcgaggattacaaggccggatttctccggttggtgcaggaggcgcggtcgaagacggagcttccggtaatcgccagcatcaattgcgtggtcgataaaggcgattggatcgaatacgctacggcgatggccgatgccggtgcttccgcgttggagcttaatattttcatccaatctacggacattcatgcccaggctcgcgaactggagttgaactatgcggagatcgtcggtcgggtggccggtgcggtgaagattcccgtttcggtgaaactgcccatgcgcctgaccaatgtcttcgccttgtcgagcgctttgctcggtcacggggcccggggcgtagtctttttcaaccgtttcttcgagccggacgtggatgtcgagcggatgactttcgtagagagttcgccttacagcgagccgacggaattgcgcaacgtcctgcgtatggtggcgatctgttcggccgtgttgccgcagttggacctttctgtttcgacgggcgtgcacgatggcgaggctgcggtcaaagcgcttttgtgcggagccgaggcagtgcaggtctgcacggcgatccaccagaagggattcgaagtcattgccgaaatgaacgagtacatcgaccgttggtccgagcggcagggtttcggttcgctcgatgagttccgggggcgtctgaatttcaagaacgacacttcggccatgttccagcgcgtacagtatatgaagtatttcccgtcggaggcgaaatagtatttgccggaatagtttcggtttttgataaagagtgggccgtccagttgtcggacggcccactcttttggatatgtgtttttggggttaatattcgatcttgtcgagaatcccttgcaggtaagcgatcgccacgccgtagttggtcatcgggacgtgctgggcgcgggcctgggcgacgcggctcaatacgtggcgccggttgaacatacaggcgccgcagtggattaccaggtcgtagggcgtgaggtcggcgggaaagtccgtgccggcaaccacatcgacccgcagtgcgggtccgatccgtttgcggagcatcgccggaattttgacccggccgatgtcttcgcccaccggagcgtgcgtgcaggcttcggcgatcagcacgcgggagtcttcgcggagctgcccgatggctgccgcgctctccacgaagtagtcgatgtcgcccttgtaacgggcgaagagcaccgagaacgaagttagcaggcttgcggcgggcttctgcgcatagacagtcgagaaaacctgcgagtcggtgataatcagtttcggcggtgcggccagcgacgagagcgtgccttcgatctggtcggtggtacagcagaccacgcggcacttcttatcgagcagctcgcggatcgtctggacttgcggcaggatgaggcgtcccttgggggcctggatatcctgcggcataacgagcatcaccacgtcgcctgtcgaggcgaggctgcctgtgatttcgggctggttgtagtcttcgggcaggttgcggatcagggcttcgcgcagggcgtcgagtcccgttctgtccgaggcgctgacccggagcggccgttgtccgaaaagcgcttcggcttccgcatcggacatacctgtaaacaagtcggccttgctgcggacgactacgatcggaatatgacgggcttcgaggagccggaaccattcgatttcgtcgttctgcggcacggctccggagaggagcaagacggccaggtcggtcttgtccagcatcttgcggctttgctgcacacgcagcgctccgaggtcgccttcgtcgtcgaaccccggcgtgtcgatcagtacgcaaggtcccagcccgtgtatctccatcgtcttgagtacggggtcggtcgtcgtgcccggcgtcgcggaaacgacggcgctctgttggcccgtgagggcgttgatcagcgacgacttgccgctgttgcgccgcccgtagaaagcgatatgcagccgttcggcgcggggagtttgctcgttcatcgtgcgaaaatttttagaaacggaagtcccgtttaccctcggcgatcgctgcgagattcttctccgtgatgcggcgcacacgttcgttgaggagcatcggaacctctttcgaaatcatcttttcacccaaggcccgggtttcgggcgatgcgtagtcttcgaggtactccttgagggtcatcagggcgttgggcgtgcagcagtcggcgatctttccggttttcaccagcgacatgaagcggtcgcccgtgcggccttcgcggtagcaggccgtgcagaagctcggcacgtagcccagttccagcagccagcgcaccacttcgtccagcgtacggtggtcgctcacgtcgaattgtgcggaatcttgctcggcatgcgtcgtttcggcgtagccgccgacgctggtgcgcgagccgccgctgatctgtgaaatgccgatttccagcacctgttcgcgcgagcgctgcgattcgcgggtcgagataatcatgccagtataggggacggcgatgcggatcacggctacgatcttgcggaagatctcgtccgaaatggcatccgggaagtccttggtgtcgatgtcgtccgccgggcagatgcggggtacgctgatggtgtgggggccgacgccgaagcgggcttcgaggtgctcggcgtgcatgagcagtcccgtgaaatcgtaccggtaggtgttcagaccgaacagtacaccgatgcctacgtcgtcgatgccgccttccatcgcgcggtccatcgcttcggtgtggtaggcgtagtcgctcttcggaccggtggggtggagcgcttcgtaagcggttttgttgtaggtctcctgaaagagaatgtaggtgccgatgcctgcatcgcgcagcttgcggtagttctcgaccgtcgtagccgcgatattcacgttcacgcggcgaatcgctccgttcttgtgatgtacggagtagatggtcttgattgattcgagaatgtactcgatcggattgttgcgcggatcttcgcccgcctccagcgctaaacgcttgtgacccatatcctgcagggcgattacctcgcggcggatttcctcctgggtgagcttgcggcgcggaatggttttgtttttctggtggtacgggcaatatacgcagccgttgatgcagtagttcgacagatagagcggcgcgaacattacgatacggttgccgtagattttctccttgatctgtttggccagcgtgaacatgcgttggttcaggtcttcgagttcgcactcgagcagcacggccgcttcgcggtgcgtgacccctttgccttcggccgctttttgcaggatcgcctcgatcagggggcggttcgcacgattttcgcgggcgtaagccagcgtttcgacgatttctccgtcatggatgaactcctccgccttggaggatgcgacttggtacatatctttgtgtttttataagctattcttgataatctccccggctccacgagatgtggcggccgatttcgttgagctcccgctccagagcggccaatccttcggcagcttcggcaccgaaggcggccttgccgtcgtagaggttgtatttcgaccgttcgtccggcggcgaaaggttgggcatcaccacgttggcaccggccaaaataccccgcatccggccgtcgcccgagagggtggcgagcgcggtggtcgaagggatcagtgctgcgggacgcatcagccgcagaatcgacagcagggtgagcgttcgttcgacgcttccggccggttcgtggccgaagggggtgtcgcggtgcgggatgaaaggtccgataccgatcatctggggttcgaactcccggatgaaaagcagatcccggaccagatcgtccaccgtttgtcccgggctgccgaccatgatgcccgtaccggtctggtagccgatctttttgagggtgtgcaggcattcgatgcggtgatcgagggacatccggacgggatggagccaacgatagtgatcgggagtgatcgtttcatgccgcagcaggtaacggttcgcgcccgcttcgaacaacgcccggtaggaggcttctgtccgttcccccagcgagagggtgatggcgcagtcgggccagcggcgacgcatctcccggatcaatccggtcagcagttcgtcgttcagagccgggtcttctccgctctgaagtacgaatgtccggaatcccagccggtagccctcttcgcagcaggccagtacggtttccggggtcagacggtagcgttctgccagacgattgctgcgtcgaatgccgcagtagcggcagtcgttgcggcagtaattgctgatttcgatcagcccccgaacgaaaactccgtttccgaaatgcacacgggcgacctcgcgggccgccctgtgcaggtattctctctcttcgggggacgcatcggtcagcagaaggcgcaactcttccggggaaagggtgcggttgcgtttcaactgatcgacgagctctttcatagccccgtcggatttagcgtttagccagttccttcgcgaattgccgtttaccggcatcgtgcaggttgtgggtgctgggacccgtgatacatccgccttcgcaggccatgacctcgatgaacttggccggggctttgcccgatttggcataggcgcggagcagggatacgtttttcttgttcaggttggagacctggatgccttcgacctgcggccggttgttgtccgccaggaagagctgtacggcgcccatcacgcctccggcctgtgcgaagccgtgggcggcccgggtcgaaacgaacggaatggggaacggatcggtggtttcgacttcgatacccagaccgtcgaaaatggagttgatctcctcgaaggtcatcacgaaatcgacgcattcgtcgcggcgtgcctccttgcgtttggctacgcacgggccgatgaagaccacttgcgcgtcggggtgtttctccttggcgatccgtgcggcgtaatacatcggcgatccggtgctcgaaatgaagggcttcatctcggggatatgcttgttggccagttcgacccacgaaggacagcaggaggtggtcatgaacgcctgtccctcctcgattttctcttcgagttccgcaccttcattgcggatggtttccatggcgccctgcgctacttcgatcacgtcctcgaagccgatggccttgatcgcgccatatactttttccgtgggggcgttgtattgtccgagaatggccggagcgacgacggcgaccatcttttctccttcgcgcagacgctgcagcacgtcgaacacctgcgaaatttcgaagatcgctccgaacggacaactgttgatgcacttgccgcagtagatgcatttgctctcatcgatatgctccacgccgcgttcgtccttggtaatcgcctttacggggcaggcctcttcgcacggtacgggcatatagacgatggcatggtaggggcagttgctgtggcagatgccgcaactgatgcagagatcgtggttgatgaccgctttgccggcacgattgaattcgatggcgtttttcgggcagttggtggcacaggcccgggccacgcaacctttgcagaggttggtgatctcgtagttggtctgcacgcacgacgagcaggcttcgtcgattacgcagagaatattgtctttctgctgctgccctttgcgctccagggctttgcgggcatattcggacagcggggtgagttcgtcggtttcgtcggacatgtcgaaacccatcagcgggaaagatttgtatttccacacggcgcgctccttgtgtacgcagcagcgacccaaaacccgtgaggtacggggactcaattcgatcggcaagcggtcgattcgctcgacgagctggttgtctttccacaatttgatgagattggtcagcaacttgtgtctgacaatcattacgttattggtaagaggcatgtcggaataatagaatgttaaacgaaatttccgtcgcaaagataggttattacccgtatgttcacaaacaaataagtataaaaaagagagtaaatattattttcggataattttgattttcaaattttatataatatattgcaatacacatgaacggcatttatgttttgaccatctaatcctaaatattatgcttatgaaaaaattattactatatattttaattggtggtatcttgttaatcggcacttatggttgtgctaattatgaagaagatttgttggacgaaatttcgccgaaacaaatgttagctactgttacgaccgaaattgagttggcggatgcggtgtatcatagagacacagtcttggatccggccgcagaatgatccgtacaggcttgagaactttcagcaggcgtacgacaatatagtatcgggtgaatcgaaaattgtcagggcatctgatgagtttgcagcaagcgcgcggagtgtgcgaaaagaattctcagcaactgccaaaacgcagttgaaactgaaagctacccactatgccttgaaaatttttccaaaaacggaagaggaacaacgaagccttgaactggacgagcagatcaagatcgcgtatacgcctttcaattatacgtcattacctgatgaggcgacccagagtcttgtgttttcgaaatcccggacacagttttgcgaggaagatgaggagaggcgttattctgtgacttacgagggcggtatgattaaggatggaccagtggagcctgtgacaattatattgcctgtattatatgccgtttggcctgtcgaaaaaacgttccctgttgaaatggattttgaaatcctttatgaagttttcctccctaaatatattactcttggtgagaatggattgagtgcggaggcaatacaaattttggagcaagaagccattgctttggctttagatgaagagagacatttaccaggtggattcccgcgcggaaaagtactatgttacgatactcatttaaagcgttatgtaccgctagagaatctaaaaatccgttttacactgggttcgaatattgaggaggtttatacagacaaaactggatattatgctatcaacaataaattgatcgacaaccaggcaacggtaagttttgtttttcagcacgaaaaatggacgattgtcaagggttctgaggaaggaggacggatagaggaaataaagggaatttatggagaattaagaagtggtaaagatttgaactttaatattaactcttcttcggctccggatccccgctacgaaattcatcgtgcagtcaatttttatcattatggcgaacacgattttataatttctacttttgttaataacagaatatcaatagttgcattagccgttgatcctggtgggtggcaaggccgatttaattattggccgacttctgtggggagaatgccttttatacaagttggcaattgtaacaggaataatcatccgagactaataggaaccactttgcatgaattgggacattattgtcaatttcatttgcgtggcggcacattcagtgcgtacgatggtacttggaatatattgctcgaaagttatgcttcttatgccggatggcatatgggagaagcatattatttaaatcagggttggaaaaaaacatctctaaactcggatataacaggtcaagcaaggcaagaatgggattatcaaaatacaaccaataattattatactcctttgtttgtcgatttggtggatgattacaaccagggtgttggctatccttctcgctgctacgatcaaattaagatgcctcaattcgtggtgaatttgtttggagcctatagaacctggaatgattttgaaagtgcacttcgtaagtatacagggtcatattttacagaaaatcaaataaatgaatttcttttttacgagcgtagctggcttcaacgtaacggttatatataaaaatgggtttatgaggaaattcttattttttgcgttgtcggcgatatttaccgcagggactccggcaggttgcaataccgattacaatgcaatcagttattttgtgtgggtcaacgacagcgatcataagatcactcttttcgtagaatccgatttagggtgtgagttcaaaaatgaagtgatactgcctggagaaagttttactgcgatggataatggtatgggtgtttgccccgttccttcaagttacatttggaaaatgacgattattttcgacgatgggaggcttggattcacttatggtgtccgttattaccaggacgacggtcggtcgtaccctccgaattacgacgcacattacgacccttcgatcgatgataattatgtattcgaggatttgaggggtaacggtcgtcaacctaaagagcgttggacttatgtcttcaccaatgccgattacgatgcggcggaggcgatggtcccgttcgagtaaatagtttgtggctctgaaaaacgaacgcctcccgaatctgaaattcgggaggcgttcgttcgatggcggcctgtcttttggctctaacgatccagctcttggaagaagctctggaaatcggccatgaaaacgtccttgccccgcagtacttcccgcttggcgagcagctccgaaaggcggatgtagccgatcacgtaattgccgtcctcgccccgatattgctcggtgatgcggtcgaagtggaggattttcagtacgtcggtttccgtgtatcgcacataaactttcagctccacgtcggtcgtgtactccggacggtcgaggtagtgctgtttcttgtattcgtaccggtagtcgtgctgacgggccatgatgtcgctcaggatcgacgaggcggtaggcaggctgccggcgcccttgccgaacatgaactggcggtcgtagcattcgccccggatcaccacgccgttgtattcgtcatcgacgctgtagatgtatttgccgggggtgacgaattcgggcatgacgaacatcgtgaacttccggtcgctgaccttgaccacttgggcgaccagtttgatcttgacccctttttcgcgggcgtaccggatgtccgagtcgtggatagtcgagatgccgtaggtgaagatccggtcgggatggacatacactccgagcgcgtgaacggtaatgatgactaatttgaagagcgagtcgtagccttcgatgtcgaacgaaggatcgctctcggcgaatcccaatgcctgggcctgggccagcgccgcgtcgtaggactcctggtggtcgaacacccgcgaaaggatgtagttggacgaaccgttcaggatgcctttgacttcgagcagcaggtcgttgtcgtagtactcctcgaggttgcggatcacggggatcgagccgcacgacgaggcgtcgtacagcagtgccacattgtgtttcttttgcaggtcgatcagctccggcaggtggcgggcgagcatggccttgttgcccgaaacgacggggatgcctttctggagggccgccttgacgattttgtaggaggccgccgcatcgtcgatcacctccacgatcaggtcgatctccggattggagaggatcacttccggatcggtcgtgaaataggacgcgtcgatgctgcggggtttgttcgaccgcacgcagatcttgacgatttccgcatgggcgttgcgggatttgctgagtacctggaagatgccttgtccgactacgccgaagccgaaaaggccgattttgatcttattcatgggttggatggatgaaagggttgaggattcggttcagttgttcgtgctcgaccagaaacccgtcgtgtccgaacggggagtcgatctgatggtaggtgctgcgcggcagcatccggtgcagcgcctgcatttcgggcacggtgaagatgatatcggtcgaaatgccgacgaccagacattcggccgtgattcgttgcagcgccgctgccacgcctccgcgctggtagccgacgtcgtgcgtgtcgaaagcgttgaggatcttgtaataggagtaggcattataacgccggcagagcttttctccttggtactgctggtaggtgcaggcccggtgagaggagaagtcgtcgctctcgtcctgctgcgagaggtcgtagccttccggcccccggtaagagagcagcccgatagccctcgccgccgcgagtcccttcatgccggcggtggcgtaaggttccccgaaggtcgagtcggcttcgatggccatgcgctgcgtttcgtcgatggcgatgctccagggcgacgctttggcagccgtggcgatcaggaccagcttgccgatccgctcgggctcctggacggcccattcgaccgcctgaaagccgccgacggagctgccgaccaaggtgtggatgcggtggatgcccagaatgtcggccagcagccggtgcgcccgtaccatgtcgcggatcgtcagttcggggaaatctttgtaataggggcgtccggtcgccggattgacgtgcagcggcccggtcgtgccgtagtgcgagccgagtatgttggcgcagatgatgaaatgctcggcggggtcgaggaatttgcccgcttcgaccgtgtgcggccaccatgaggccacgtccgaatcggcggtcagggcgtggcagacccagatgacattgtcgtgggctgcattcagtttcccgtaggtgctgaatgcgatcgtcagttcgggcagaatgcctccccgctccaattcgaaaggttggttatgacggtatatattcattgtgtttacagtcgttttaatgcgttgccgatctcttctttcaggtcgtcgatgtgttcgatgcccagcgagaagcgcagcatgttgggataaacgcccgaagcgaccagttcgcgttcgttgagctgggagtgcgtcgtcgaagcggggtgtaccaagagactccgggtgtcgcccacgttggccaggtggctgatgatctccaggtggttgagcagcgaggaggcttgttcggccgatcctttgacgcggaaggtcagtacgccgccgaaaccgttggtcagatacttcttggccaaatcgtggaacgggctactcttcaaaccggggtagtttacgctctcgatcttggggtgcttctcgagccactgagccatttcgagtgcattgtccaccgatcgctgtacgcgcaacgagagggtttcgagtccttgcagcagcaggaaggagttgaacggactctggcaggcacccgtgtcgcggagcacttcgcaccgtgcccgtacggcgaaagcctggtcgccgcagttttcccagaagttgaatccgtgatacccttccgagggttcgctgatcaaggggtagcggccgttgccccaatcgaagttgccgccgtcgatagccacgccacccatgctgttgccgtgacctccgatccatttggtcgctgcgtgcagcacgacattggcgccccatttgatcggctggcaaaggtagccgccggctccgaacgtattgtcggcgatgaccgcgatgccgtgtttgcggccgatttcggcgatcgcctcgaaatcggggatattgaaggccgggttgccgatcgtttcgatgtagatggcccgcgtacggtcgtcgatgagtgccgagatgctcttcgggtcgtccccttgtgcgaaacggacctcgatgccgagtcggcggagcgtgtatttgaactggttggtcgttccgccgtagaggtaggaggtgcttacgatattatcgcctgcctgggcgatgttcgtgatggcgagcatttgggcggccatgcccgatgccgtcgcaacggctccggtacctccttcgagggcggcgatgcgctcttcgaaaacggcggtcgtggggttgttcaggcgggtgtagatgtaccccggttccgtgagggcgaaaacggcggcgctcttttccgcactttcgaaggtgtaggccaccgtctggtggatggggacggcgcacgatccggtcgcgggatcggcctgttggcctgcatgtacttgcagggtttcgaaacggagattctgttttttcatggttttgaaagttgatttatgttttcgggattgttacaaacaaaaaaatccggctgaaccagccggatttaagagatacacgtacgacgaatcttacacccggcatttacacctgcgcatcgacatcatcatacccatcatcgaaaccgaaagtccgacgatcagcgagtaagaattattggatgtaatgccgtttttcatgcgggtaaaatacgggtttgttatcgtattgatgtcgtaaatatagttatttttcgtgaaatggtgctgtcgagagaaaaatattttacaatgccattattcagtctgaaaatgcaatatttgtaaatataagattttttctcgagaatccctgtttgtataaaatgttgaaaattagatctatttgtggcccgttccgtatttgaaattcttaaattaagaatagtttaattaaaaaatgtagttgaaagtttgatatttgtgatatgttagatttacttgtttgatatgtgatacttaggcaaattatttgccgatgcagaaaatattaaaatagcttatattattgatgtccagataattgtgcgtgatatgaagtgtgtcggggacattctggggacggaattttgctggccaaaagaaaaaaagatcaaatacaaaatcgctttttaccccatatcggaggttatgtttcccaaagatatgaaagataaatgtaatccgcgcaaaaggtcaatcataggagtttagtctggtttgttgtatatctattcaagttctaaactaaactttcttcacaacgtcgaaatggcggacatcggtagcaagaatgctcatctctttttcttttggccagcagcttttgtcattttgtttttagtaagtagttattgatgctagacagattgatttagaaaaaaggttgtatcattacaaccttttaggtgttttttgtatctttgtactgtttgttgataaatatgaatatgaagtatcttaatataaagaaagcgttgactgcatggcagaatttgcagccgctgtcggagaaggatagggaaaggctcagtcgccgttttactgtggatttcaattacaacagtaatcatattgagggtaatacgttgacttatggccagacggaaatattgctacttttcggcaaggtgattggggaggcagacgtgcgtgacgtacaagaaatgactgcgagcaacgtcggcctacgaatgatgacggaagaggctacggtgaagggaatgccattgacgcagaattttatccggacattgcataaaaccatattacgagaagattatactgtttatcgagatttgcctggtggtatgcagacgagttatgtgattcatgccggccagtataagactcggcctaacagtgttatcacccgatatggagacagattcgaatatgcctcacccgaggagactcctggattgatgggcgatctggtggcctggtataatgcagcagaacaagaagggaaactatctccagtagagttggccgcactgtttcactaccgttatatccgcattcaccctttcgaggacggtaacggtcgcattgcccggctgatggtgaactacattctgactcgtcatgattatccgatgattgtagtccggagccgcagaaaaagtgaatatttggaagctttgcatcagacggatctcgaagtaggtcctgtccccagtgatggagcccatgcagggattaaggatatccgtccttttttgaaatatttcaatgacttggtggctacggaagtgtataatgatgtgctgttcgtgagcgagaggaatgagaatgtgtggtggtatgatggagagcggattgcattccgaacacccaattatacaaaaattctgaacgctatgcgaactcagcccacgctgacgcttgcagacatgaaagatgaaacgggtatcagtatgacggctattcagaagctgctggatcaactgatttccaagaaatatgtggaacgtggagagagggatggtagctggagagtgtttgtgtcgcaataattccaaattaaatagacttgaatttataactttttgaggcggatttctcttgcccaagtttcaaaaggctatcggttacgttacttgcatgattcggctgtagactttgatgctgatgtctacttatctgtagaataaacaaaaaatagattacaatgtatctttccattcttagactctggaatttcaggaaatatgctggtgcagataacaaaccgggactagaaattcattttcagaaaggcgtaaatgtgttgattggtgaaaatgattccgggaaaacagccatagtagatgctatacgttatgtactgagaactcaaagtggagaatttattcaatttgaagacaaagatttctatcaagattctgatggaaacagaaaagatgaatttaaaataaacgtaaaagaaaaaggcaaggttaatgataatacagcaaaaatgcagtccactaatcagttaggtgtttagctcataatactgcataagctgaaaaaggaggttcgataaaagttgcgaaagacttcagttcccatatcgttactgatataataggaacaagaaacggtacaacaggttatatttcagtaatttgcacaatttttcatacttggagacaactcgcttgatattaactttgtaacaatcaaaaaagtatgaaaacgagtatgagcagatcgactttcaaaatcctcttctacgtgaagaagggcagcgagagagccaacggctatctccccctgatgtgccgtcttacggtggacggcgaaatcaagcagttcagctgcaagctggacgtacccccgaaactttgggacgtgaaaacggcacgtgccaccggcaagagcgtcgaggcacagaaaatcaatgcggcggttgaccggatacgtgtggacgtgaaccgtcgttaccaggaactgatgcagtccgacggctatgtcactgctgccaggctgagggatgtctacctcggactgggcgtgaaacgggagactttgctgaaactcttcgaacagcacaacgaggagttcatcaagaaagtgggacacagccgcgtacaggggacatacaaccgctaccgtaccatatacaagcacctgtgcgagttcgtcccgaaagtgtaccgacgtgacgacatccccctgaaggaactcaacctgaccttcatcaacaacttcgagtattttctgcgtacggagaagaaatgccgcaccaataccgtatggggttacatgatcgggctcaagcacatcatctccatcgcccgcaacagcggtgcacttcccttcaatcccttcgccgggtacatcaactccttcgagagcgttgaccggggctacctgacggagcgtgagatacagacgctgatggaggtcccggtgaaaagcgggacctgcgaactggtacgtgacctcttcatcttctcggtgtttaccggactggcatacgcagacgtgaaggcgctgacgactgaccggctccagaccttcttcgacggcaacctctggatcatcacccgccggcggaagacgaacaccgagtccaacatccgcctgctggacgttcccaggcgcatcatagagaagtacaaggggctgtccaaggacgatcatgtatttccggtaccgagcagcagcagatgcaacgtcatattgaaggaacttggtaggcagtgcggtttcaagatacggctgacctaccatgttgcccggcatacgaacgccaccaccgtgctgctctcgcacggtgtgcccatcgagaccgtaagccgtcttttgggtcatacggatttgaaaaccacccagatatatgcccggataaccaaccagaagatcagcagcgacatggaagtcctgtcccataagctggaaaagatggagaaggagatatgcgatgccatctgagggaaggcatttacgggacgagtgatttttccccttcttcatcaaagttccgccgtccccgcggatctgcgcgttttccctccggtttccggcagaaaatttccgtacggtgaaattttctgccggaaaaacgctccgaatgcgcgggtgacggacgggaaaattgattcagaaggcgaaaactgcgaccgacgtagtgcatgtgcgacaaggaaaaaggaaaagaattgtccaggagccccttttcatgtcgggatacggcatgaaaaggggctccggctgtggtgaaggctctcctgctccctctgcattgcatgtacgggtggttttgcccatatccacgtccgccggtattgcttcttttccgacagccgaccatcctgtcacttccctgtaatcctcctcaaaatcaacaccgccgtataaactgcatgaaaacccgggcacgcttcctgtttccaatcccatatccattccttccgcaacatcacgtattgccgttctcatttcatatccttgaatatttctccaaacataccgaagacagaaaagctgcatggaatctaaattctcaccggacagacaatagatagaaggaagtaatctgtcatcctcatttcttgcggcaaaaatagttgtttttcaggccggtcccgcaaggcggccctgcgggctggttgctcgtgaaaaaatcttcctcacgcttcgcgtgagcgtattttttcacggcaagccttgccggagaccgccgaaaaacaaactggaggaagcacaagaaataagaatgcctacccgtgtaggccatgtataacgtacaaatgtacgactcaaaaaaaacataaggctatggcagacaagagcgcagaaaaggaaagactgttcaacgagtggttcacaaaatcctatgacaggttgagagggacgttacgccggtacggaatgctggacgaggacaatttccatgacacctaccttttcgtaagaaggcaggtgctggttcccggaaaggacataacggactatgacgcgtatttcatcggatgctacaaaaaggcggccctggtaaagattaaaagggagaaccggtatgcacaccctgaagatgatttcttcctccgatgtggcgaggaggcaaaattcctttccgaggacgacctgaacgggtgcgagaggctggttaaggacatactgcgtttcgtaaggcagaagttctcctacgaggaataccggatgttcatgctcaggttctatgaggcgcagttctcgttcaaggcactggcggaatgcatgggtatctcggcatcggccatatcgcagaaagtatgcaggatagtggacgcggtacgtacccacagcggtttcgcatggagaagccggatgctggcggtggaaagcttcatgtattgaaaaacgaaaacagttcaaccgataaaagaaagacaattatggcactgatagtatacaacagggaaaactcccgtccgcaggaagtcacatacaagggaaagcggaccatcaaccttgacagcaggggaaccgtctatctgtcaaagacgatgtcaatcgaattgggaatcctcggcggtggacgggtgaacttcgcccacgatgacgagacgggtgactggtatatctgccgggccgacgacagcgaggggttcatcgtctggaaggataaaagatgcgcaaggttctcggccgggtttatcgtgcagaggctcatgcggcaggcgaaggtggagaggaagagcgtgcagttcatgatggcgaggatgccggtagagattggcggggtggcctattacaagatactgctcgcgaatccgatactcagatagaggcatgggccggagtagtccggctgtatatgacatgatggagacaggcgcatccgacgggacaggagcccggagggtgtgcctgtttttatgcgccgccatgtttacacacggacatgcggttgtcaccggccggcataaggtcactccggcaagaccgggaaacaacattgccggcggataatgatatcagtacgggatgtgccgccattacaggaacggaccgttccaccgatacacgggcagcccgccccaatttcagaataacataatgacataataaaataagggtctttttttataatggaatccccgtatcttattgccataccggaaaaatgtttccatgtcccgccatgttatgccaatgtcgtcaccggatcataatttataaagaaaacactctgtgtataaatactttatgagcaaattaaagtcgttcatccggtggaaagaaaacgaagggacggccggtatgacaaccgcccgccccttcattcacgatcccgtacggaacttttctaaagttcctccggtctggttctcgcctccctgtagcagccgtcaagcagcttctcgatgtcggaagaacggtacagtatcttgccgcctagccgggtgaaggcaagcagaccgctgtcccggtactgttgcaggctgcggcggctcactttcagcttttcagccagttcgcggtccgtatagaagttctcgcccgccatcgccggtgacctgccggcaaagagacgctccatggaaacggagagacgctcgacggtagagaagaactctcttatatgctcgctgctctcacgggtgagcagacggttatcggtattcatcatgacttgatctttttttgttcgacattcgtttttcatggcctttcagatcgaccttcccatactttcagcccgcttgcggcgctcctccactatccggatgatactttccacgtccccgggcttgtaataagtcttgtgacagatctgtgtgtatgccagcgtgccgttgtcacggagggtctgcagggttctcgggctgaccttcagcagcaggcacacctcctggttgtccagccatttcttctcctctatgtcgccgtacagccggcagagggtgtccagccggtccgcgaacgtccggaaggccgagagcatcgcctcgaaggtccttgcctcaatgttcactatttccataatcactgtaatttcaggtttgacatctgtttcattctctcttcggatccggattccgtgccgcaatttagtgaatcccagcggaacatcctgaatttcaagacaggatgactacctttgacaccatatgcgtgcctgtttcatccgcaaagtaaatgattgttcccggatatggttccggcccttcatcagatgtcattatatgtcatcagatgtccggaatagatattcaattggaatcgaagcgatctttctttttcataagatgtacttttattgatttatacaatagaaagatgcgccaaatgttatcgtggagacgcttatgaacatgacggatgtccatcagttttgtcccatcccggtaaagaggccggttatcaggatgttcttccatatccggactgaaagatgcctgccggacaaacactgatgcgggcatcagtgtttgtaaccggccattaataattataaccaaccattaatgaccggttataatcattaatggttgcaatcggtctttagtgattgcaactgcatccgtaaagttcatgccctgcttccgatgcgtataataatgaagttctcaccgtccgtacaccctgaagcagagaatgatacagaagaatacgccaacagaaccctaagtgtcgatccgtctgttttttatcgttttatttgccggcgacaatcggtttcccggtatatgggaaaccatcgtatcaacgtaaatccaagtttctatgaaagaaggaaaagaagacatgccccttgtgggaaaaacgatggcggaaggacatacgcaccgtatggccgtcctgtgtgagaagttgggaagtaccctcagggagatacttgacggaacctgcccacagccggcaaagccggagaaggcaccgaagcgcccggctttggaaaagtatcgggaaacttatctcattccccctaaaatcaagggacctaaagccgtgttcatcagtgaggaaactcgtagtgccctggacatgatcgtcctgagactgggctgccggggaatgagcgtatccgggctgctggagaatctggcaagacggcatcttgaaacctaccggcaagacatcgaacgctggaggaaactttagagtaccggtgactgtcagaccgtgtgaatgactgccggtcgtatatcagccggaacggatgactgtagaaaatataggtacacctccggcggatatactttcattgtcaccttccggaccaggaatggaaacggttatctgaaaccattgatattaatatttcctgttgttttgaagggtggattctgtaatagtaatagcaaggttatgtttccggattcccgaaaacccttgctccccagcgcccggcggttgcagggagggtaaatccactcccgccggtcgcagattttggaatgaaagaagtacggacgaaaaagaaaaaacatatgacaaaggatatgaatgagatgaagaaaaaacgcggccgtccggcactgggcaggacgcggaagctgaccaagggagtgacagtgaagttctcccccgtcagctacgaggctctcagattcagggcaaggaagtccggccggagtctggcggtctatatcagggaggtggcactggcggccaccgttacggcaaggcatacgcctgaagagaatgcgctgctgcgcagcctggcgggaatggcgaacaatctgaaccaactgacaaagctctcgcaccagacaggcttttacaggacaaggctgctgatagacgggctgctgggaaagctgaagcggatcatggtctatcttctcggtatgttgagcgacagtcctttcaagttctgacaaacgtttattaatggaatacccctttaaaagataatcctttaatacactattcgcccatttcctaaaaagggttgcgttcttgctattaacccgatatcctattgacagaatcgcatcaagattataatatttagtagtatatctctgtttgccgtcattacccatatgttccaaaatggaacatgtgctatctatatcaagttcgccgcttttgtaaatgttgttcaaatgtttggtaatagctggccttttagtcccgaacaagtcggctatttgttcttgtgtcagccaaacggtttcatcttccaacctcacttccaacttgaccgcttcatccggctggtataatatgatttctccctgttccattgcttacttaccttttcttaattcatcaagcctctgcatcgcaccgctgaacttctcaccaaacatcatatcatcgggcaaaacaaaccaggtgggaatacctctcgactgtggattacctatacattcatcttgcccgttctgtttgcggtaatcgtcccattcactataagcgatgttccaacgaatacctaatttataggtattttcccatttaataatagccagtgaataggccggatcatctttgccgtcataaatcacttctacaacttcaaccacccctttaggggaatttataaacttcggatttttatacgaataagtgctcatgtcttttattttttatttatagcacacaaagatactcaaaaacaaatatatacatatatacatacgtatgattaacgtataaaaacatttatggttattctaatctttgattaattccggtacagaaacaaaacgtaccgaaagacggaaacaggatttatttcggtacgcttccccgatcggtacaaaaaacacgcaaaaaacgaaaatactacttttagtcttttagtatattagtattttgactatatgttgcggacatgacaaccatttaaaaaactgaatttatgagcaaagcaaaagtaatctccgtattgaatcacaaggggggagtaggaaagaccacaaccacgatcaacctgggcggtgcgttacgtcaaaaagggtacaaggttcttttgatcgaccttgacgggcaggccaacctgaccgaatcgctgggcttctctgcggagcttccccaaacgatctacggtgcgatgaaaggcgaatacgacctgccgatctacgagcataaggacggccttagcgtcgttccctcctgcctggatctctcggccgttgaaacggagttaatcaacgaggccggacgggagcttatcttagcccaccttatcaagggccaaaaggagaaattcgattatatcctgatcgactgtcccccctcgctgtcgctgctcacgcttaacgcactgacggcctcggatcggctgattatcccggttcaggctcaattcctggcaatgcgtggaatggccaaacttatgcaggtcgtccacaaggtgcagcaacgtttgaactcggatctttcgatagccggggttctgataacccagtacgacggaagaaagaacctgaacaagagcgtttcggaactggtacaggaaacattccagggcaaagtgttcagcacccatatacgcaactccattgcgctggccgaagccccgacacaagggcaggatatttttcactatgcccccaaatctgccggggcagaggactacgaaaaggtatgtaacgaactgctaacagaaataaagtaaccatatggcaaagaagaacgatttaaaaaacagtatgtcggccgggctgaccgggggattagacagcctgatccaatccacggccgggcaaaaagaggctcaaaagccgaagaaagcgaaaaccgtgcattgtaattttgtcatggacgaaacctatcaccagaacttaaagctgatcgcgatccgcaaaggcgattcgctaaaatcggtattgcaagaggctatatctgactacttggataaaaacagttccctgctataacagcgtatcgggaatatacagggcaaacactccacaaaagaaattctccaggaaaaaggtacgcagaaaagcaaccctacacataaattacagatgataaaagcaataaaaaacccgttggcaggattaatcttgcgtatgtttaacctgccaacgggtacgatattaataaacgtttggattaaggttagacgtttacgtctttatctgctttatctgcattaccccagtctgttgtctctgcatcaaactggatcggattcaacacagcctctccctgatcattataaccaccaccgaaaatcaacgtgtagatatgacgcttgcccgctacccatgtatctccgaacggaacataaattgttttgtattcgcttgctgaacccaacagataagctccggactgccggattttgcaggcgatctccagataacattgcttcgcattatcggcctccaacttgcttttggtggctgtttcggaaactttccaagcagtcagctcctgtggtctattcagcataggagtagttgtggaaatatcggtagctatagtattacttttgaccgtgatgtttacgtctttcactacggtaaatttgcccagacctgatacttcacttggtaaatcagcaggatcactccaacttcccgttccatcggctgtcgcaggcaatgtgaagaagccgcccattttgacattatgaatcttgatcatgttgatgtccacctgcatgttatcgtattgggtctttgctttgaatacgacctgtgacagaatatgtttgaaattaaatttcactattccgttgttcatgtcttttgtctggcctttggccatggcatacatcacgtcgtagtttgcatgacccgtgttggctccatactcatcgatgcaggtataacttatcttttggacagtcccggaggcttcccacatataattcatcatcatgtcttcactaaccgttccgggattgaacgcgtaaaagtccaaagccccggtaggccaataacgaaggtcgctcgcatttttataatcccacttaccattattgtacacgatattcactccgtcatgtccaaattccgtgtctacctttcccatgaaggcagtaccatcccccgtaaaagcgaacacgtcgaaatcggtgttcttcaagttgtcgggggtagtaggggtagccctcgtttccgccgcattacttaacacgttaaaaccaatcgcattccgtgaggaggtttccacattcgcaatctcctcgtctgagcaacccatcaacaatgttccaaagattgccccaagcattactgtactttttttcataaaatgaataaaattgttaataaatataattaataaaactcgattacaacactatatccacattcacatcatcccaatcatcaacgtccacatcaaatcccggaccgccacttcccggctcggatggtacctcataatcaaaattcaacaccagatgcacatcaccgacatgccccgctaccgggacatcatgcacttggtcgctcacgtcctgttccaatacagacatgctgcctgaacggttcttgatatacagccggaaaacattgggctctccttcaagtgcggaatgtccaaacgtatagaatccgcctataatctgattccgtgaaaccattccatcaaagagcaggctctccgaaagatcggcgggcaaactgtcgccggacatgttaagcgagccggacatgccggaaagagcggcccgcaaatccgccaccctatccagtccccgaagaccgttcacctcatacgtgtagtgacataccatgtttacgggagttagccgtactatctccgcgcttcctcccggaatgtccttgaggataactctgtctatatggtcgccacacagccagggtggggtgacagccattgtccggttatccggcgactgaacatcacgcgtatcggcagtaaaaagcgtgtaactgccgttttctttccaaaccatcccgtcggtatcgtagttgaagcaaattacccggtaatcattctcggggagctccacttccccatcctctcctccggggaaatcaaatatccacgtgttgctttcatcatcggtcggataaaatacgaccctcatgccttcaggcttgtcatgattggaaatcttggtccagtcgaatattacccgcaccgtggcaaagtgcggatgatcgtaacataaatccttatgctcacaagccgtcagtcctatccataaaaatatgaacaccagacaaaagcgtatccgtatcactgcctgcctcctttcttctcgttgtagttgccacggccgatcaaccacaccaaagagatacccgccttggtcgggccgaaccagcggcgttttttagtggtctgccatacatagtgaccgtccaaagggatgtactccttgtacgatcctccaaggtagccgattcccaacgtgaaatccacattgaaccgatgtcccacaggtaacgagtagccgtaagccacgcctcccccgtaactccatttatcccccaagtaacctttcccacccaattcgaaatcataggtgacgatctgcccgtacaatccgacatgatgcccggaaaacggtttttccaccgctctccgaccgaaccagcggcgcaactccacatctcccccatagatacgccaataattatgcttccgatcacttttccaccaggcatacatccaattcccggccacagaccagttcttccccaaacagaactcaaccccgatgtcaggtatcaaaacagcgtcataaagcaagtttgttttcaccgccatgcaaaacggccgtttctttaccggagctatgacggtaacggtatcacggatgcacaacgtatcacgtgtatgtatatataccgtatctctgacgggatttatcggatcactatcatagcatattttcaccatcgacgaacgaagtttcggaaaatggaatttatacaaatatgagtatggcctcccccctttcagtcttttcagttctcccccccaataagggctgtcctggttttccaaacgtacgatcttctccaacaaacgaaggacatcctccctctccggaacattcacatccgctctcaccatcgttataagtccgttccagtcgcttcccgaaaaatgaaaatcccactccaataccggaatctttatataaggtgatatataccgccacaaaacctctgctcgtttttcagacagccttccattcaacagcccccctccttccggggaagctcctcctattatttgaattttcctgataagacggacggagtcgttcaatgcggaacagattttagcaaaccgctccatctcgttcccattgtcaagtaaacatgtatctatatttacctttccttgatgaaaatagatccttaccgaatcacgcttctcctgagcggatatttctccgcttatactcaacacgagcacgaacaatacacatttaatataaaaacatcttttcgtcatttaatcatttgttaatatgacaatccaaacccaggcttttacaccccctgaatttcaaccgctaaagatatgcacctataaaccaacctccaaagcaaaaaacaagtattttaaacttataaatacttagggacagtcgcgaaataggcttaaaattataacaaattgattgtcaatgtgataaaaatttcatatcttagctacaggacctctcgcagaccatgcaggtcgtggacatcacccacctgccgcaggtcgcttcgaaaggcgacactcacttcgtggtttacaaagacgccgaaggatcccatatccgccgcctcgacccggaggagcggattaccgaaatcgccaaaatgctatcgggcagccaaatcacggaagccgcactcgcacaggctcgtatcctgctgttacggcataccggaactcttcggtcgtgaggcttccttcatcgacgaccgcatagaccggctccaaccggtcgtcggcccccagaatggcatagcccgcctcgttctcgaaattgacgatgtagagcagatcctccacgtcggccgtggcttcgctgcgggtcgttgaggataggtctgttgaactctaacctaatctcttgccatagagatatttattgtgtagcctatatgggcgcatcgcaaccataccattactgataaggggatatttttcggttacggtctccgttttacgggctaataaatatttcagcttttcagaccatgatacggttttcgtacctccacctttgacttttattgttgcatttccagataggataccatcatcaataagtttgcttgtaagcaattccaatatagagcggcgttgcaagtcctcttgatgtccccatgcgtcatactcaaaaaagtaatagtcgtctgataattcacgttccaacattttaaccacgttggattttccagatccccaaataccttcgatgccgataattcgaggtaaagtacattcctcatccaatgaatcattctgacaaaaatggcgagcaatagtttttgccaacctttcttgcgaacctccatcgaatttgtcaataccacacggtttattttggataaaccgcggatattgctgtttggattgtagttttgtttccatatacgtaatttattgattatacgaactccaaataattctcccgatttaccacatgaaactcggcatagggataggcttcttggaaggctttcggtgcggccggcattttatttccccacttgaactccaaggcggtaagactgtcggcactctcctcaatcaggtcgatttcctgtttgtcgtaggtgcgccagaaatagaactccctgtgcagtccctcattgaagttcgctttgcgccgctctccgatgatgtagttctcccacagcgcaccgacatcctgccgaatggccagcggtgagaaagccccgataatggcattgcgaatgccgttgtcgtagaagtaccacttgccagcttttgtaacctccttgcgtaggttacgcgaataagcccccagacgatagataacgaagaccttttccaataggtcgaggtatttttcaacggtcgtcttgctcatgccgagttgtttacctaactcttcgtaagaaacttcgctgcccaactgaaaagctatcaatcgcagtagatcgcgcatcttgctcgaattttttaagccgtcaattgctaagatatctttaagcaggtatgcaccgacaatatcacgtaggtagtctgttttacgttcatagttctccatcattactacttcgggataggaaccgtaaatcaagcgcgcttcgaggttctggcgggtttcaagtgccgtttccgtctgtgcgatttcccgttgcgagaatggtgtaaggagaaattgcgtactgcggccgaccaacggttcaccagtcttattcagcaaatcgaatgacgaagaaccacttgccaagacacttattcccggtatttcatcaactatcaacttcagaatactaccgatttgtggtatgttctgtgcctcatcaatagccagcaaatcaataccatccaataaatgccgataattggctattgagcgattctccaatagtgctaatgtgtcgtagtcttcgccgttgagcatcatcgtcctacctgaatagttgtccacaattttacgcatcattaccgttttaccaacacggcgagcaccaaaaatcagtactgctttattgggcgcgattcgtgctgtaatcttctcttgaagtattctatttactgtttccataccttataaaatataatgcaaagataatcatatttttttaattggcgaattttacaaaaaaaacgggctattaaatggcgatttttacaaccacaatcttatggaagttgtttcattgtttttagtaatgatatatgttcatactatgatgactcaataatttaccagacatacgtttctgaaatttgtccttataggaatgaaaaactcacatatattgtgctaattaatatataattaaatgaaaataaaaagacaggatacgagtattcctgtcttctcatatgtaatggatatttttttattttctcatccgctccaactcctcatcacgcaacattctctcgttcagtttttcctgcatcctgtcaatgaaataggtgcggctttcgttcttccggcgtttgatatcagtgtagaagcggtagcagtctttagaatcaaccccgaatatcttatagagaagtggggcgagctgtttgagcggcatattgccgttgttgatgcagcccatcacgtctatgccgtagataagttccacgaggtcgatggcattgcccgtccattgaagaaggctggcggtggtttctgttgcgttgttggcggatattagtggtggcacttggggcgtggcaaggaatttctgcatctttcttacgaaagacagagccttgctgacgtaggcggcaatctctcttttttcttctgacagattacgtacgggatggtgctgcaactcgatttcgatgtaggcaagcgcgatgacggtaaggttcatgtccatgccgccgttgcacagttcgatcacttgggtggcgaaagccgtgtatgccgtttccatattgcagtcgccggcttcgtttatcaggcggaaaaagtcggtttccgccagcaagaaataattcatggttctgtcaattttgaaaattacactttgttttctgcgtgcgcacatgaatataattggcaaaaaacgcggcagaaaataaaaaatccaacactcaattttacaaagtgctggatttcagaggtataaaattcagtattttttcacaaggacaaattatctccgacttaaattgtttgtaatcggaacatttattctattcctgaaaatagaaatgtatgcttgccgcacattttggctatcttgcttttttatcaaggatatagataatgcgacatacaccgttgggatagcttttcaaagaggaaagcgtccagtgttgctctggcagagccgacttaaaaaaatgtcgtccgcttccggatatgaaaggaacggtgtatagtatgatttcatccacagcgtgcatccgcagcagtccgtttatatagtctgccgtgtccggtgtggcttccgcgaggtaacggatgtttgtgcagtcttttctccattcgtgcagcattgaaatggaatagtccggtgtcacacggtaaaaggctttcttcctgatttcatcaagaccgcaacggtcaaggcacaaatcctgatgtgctttatcatataactctgaagaaagacatccgtccatcgtcagtacggcgagaatctgaactttacccataatcgtttcctttcgttaggcaagggtaaaaaagtagcgtgcaattcacactaccttcaagcgatggctctggtaaagcctttacggagagtacgtgaatgcacgctatgcgtaagcatagcataagcatcacgcaatcgtctccgtagttccaatttaccagattttcgcttgaaacgccttgcggtcttatcctatatgttggcggcgaaaagctcctgccaatcgccgtttttctcaaatgttatgcaaagatagccaaattcagtgaattacgggctatgattgcttgaatttatatttaagtccatactcttcaagtttgctgtatagtgttgtcctgcctatgccgagcagttctgcggcgacactccggttgccgtttgcctgtttcaacgcacgcaatatccgctccttatcctccgcgtcattgcgcaaggcgaagctgacagtagaggtcggtttcgtcacggcaagttccagatgctctttcatgacaacaccttcctgcgcctgcaatacagcacccataactttctgccgaagttcccgcacgttgcccggccatgcgtgtgtcagcaacgctttacgtgcttcggaactgaacccgctcacgctacactccagctctctgtttgccatatcacggaagaactctgccagcggcataatgtcttcttgacagtcacgcaacggaggaacggttatcccgaagtcgtgcaggcggtacagaagatcctgccgaaaacgcttttcattcaccgatacctccaaatcttcattggtagcagcgatgatgcggacattgaaattccggtctgccttgtctccgaccgggcgataccgcctctcctgtatggcacggagcaacatctgttgggtttccaacgcgaggtttcctacctcgtccagaaacaacgtgccgccttccgcctcatggaaatatcctttcttggcattgtccgcacctgtaaatgcacctttgacgtgtccgaagaaagccgacggtgcaagctctttggagagtgaaccgcagtccaccgccacaaatggcttgcctgcacgtttgctcttgtcatgcaacaggtgggcaatatgctccttgcccgtgccgttctcaccaaatatcatcacgctcatatcggtggcggctaccagccttatgcggtgcatgattttctgaaaggcggaaccttcacgggcgaatataggcatacggcgttgtcctgcctgacgttctttcagtatggaacggatcagggggacaagtttatcctccacaagctgtttgggaatatagtctatcgagccgagtttcatgctttccacggcggtattaacttcggcgtagtcggtcataatgatgaagggctgcatctttccctcctttcgcatccagcacaaaaggtctatgccactgccgtcaggcagacgcaggtcggcaaccacgatatcattatctgttgcctgttgcagatgtttcttcgcggttgagaggtggtaagccttcatattgcggtagccctcccgtgacagcatattgcagacatattcgcaatacacgatgttgtcttccaccacaattatttttgtcttattcatcttcgtattttctcctttcctcttctgccaaccgtattatttccactcccttatccagcacggcagtcacggcatggcttaacgcttcaccatccgggagagcatcgccacgaagcaatccgtaaagtacattcagcggttggtcggcacggagcacctcccacgaactgcgcaggtggtggatcagggaatccagcttttgcaggtctttttcttttgctgcatcccgtaccgcctgcatttccttttctgtttcagttatcaacttttccagcatgacggcttcattgccataggacaataaggcggaaaagtccggtttcccgtccggtgtcgcttttatggcacacctgtcggaaacctccatcagttccgatatggagaacggtttgaacaggcatccggcaaagccttttgccaatagttcccctttgttacaactgcccgaagcggttgccacaaccaccgggattgttggtgaattgcccacgttggacgaacgcaacagttccagcaattcgaaaccgtttatatcgggcatattcaagtctgtcagcaacaggctgtattctttctggcgtatcatttccatcagtgccgcagcatcggtgcaagtgtcgcagtgtattccttcttgggaatacatctctttcagcatcagaagtaatacctcatcattgtcaatggcgacaacatcatggaatttattgttatgataaacaggtgtattgcttgtatatccaagctgttcttcagcttcctgcatagaaatttcaactgtgaaacgactgcctttccctttcttgctgtctaaacggattgttccgccaagcatcgacacaatattacgcattatggcaagcccaagcccgaaaccctcctttgcggcggcatttgatagacgttcaaacgcaccgaacgcttgtttctgttcctcttctgtcatgcctgtacctgtatcttcaacgaccagtgtcagaactccattatcatattcagtaatcaaagaaacaccgccttcttctgtgaacttgacagcgtttgacagcaggttattcccgatttgtattattcgctctttgtcggtcaatacaatggcatcgtgtccagtcttcacggacaaggacagccctttgttctcggcaacaggcatgaactccgtttcaagtgtgtgcgtgattgctgaaatccggcagggtgacagacggggctgttccttgccgttgtccaggcggaagaagtcaagcaaagtgttaagcatatcccgcatacggtcggaggattgcagtatgttttggatatactgcccggacttatcctcacactgttctttccgtatcagtccggcatagcctgttattgctgtcagcggtgtgcgcagttcatgggtgatagtatgtaccgccttcttccttgacgttatcagtgcctcgttccgttgtacggattgttccagttgccttatcaaatcagttgtcttgtgcttgtattgtttaatgctttttgcatcacgatgtatgatgatgtaggaaattaacaacaatagaagaacgaatcccattaaaccgcctacttgcataaatgacttttcacgcatggcaactatttcgttttcccggctttgcagttcggtttgtaccttttcttctatttggcaaatcaattcttgcagttgtctgttaagttctgcattacgagctgcaaggctgtcggcttgttccgacaattggcgatcctgcactttctgttcgctgattacgtttctattgaccgaatgaaggatagtggttgatactgctggagttacttccttttttttgccgaatatgcctaagaaaccttttcgttttggctttttggactgttcctgcacacttttctgtacaataaccggaatttgattggctatcttcttgttaatagattgttgttcatccattaaccggactatctggaacatctgtcgttccttatcctctaaaagactgcgcacactatcgatgcgctctgctggataggtggccttgaaacggcagagcatactgtccattgccatacgccgtgcatggtaatgctcgatatctttatcgttccattccagtattgtttcacccaatagagaaaattttatcatttgaatattgatattgtttatttcttttcggagctcgtctatttttttattgccaagttctaatgcttctatctcctgccattcatagaggctattatatgccatacatccgataagaatggagataagtatatatcccaaccgtattgccttatagaaatttcctgaccgctccattattttaatgacattgatttttggaacatgaataaaagtttatctttttcgttcatgcggatattatcagaataaccgtcttttgttatttgatacccacatggcttaaccataaaaatgcctaagcccttagtgtacgaacttacttctgaggcatagtctttacttgtatttaatggaactttccctttaatatgacaccactcattattacaactgatgtcttcaatctcagacatcagtttttgcaaatctgtaatagctttggaactcgctacttggggtatctgcaactcaaaacagagcatcggttcgagaatgtccacacctgactgttgcaaagccagcctgaagacataaggggtcagctgtctgaaatcagcaggtgtacttaccgggctataatactcggcttgagtaaaagttactttcagatctgtcacttcccatccatgtaaaccagattggcaagacatacgaatcccttcaaaaacggcattttgaaaagaatggttcagataaccataggagatgtcactttcgatttgcaaccctgcccctaacggtaagggttcaagagtcagccctattgtggcccagtaagggttgggtggtacttcgatctgaataatcttattgaccttttttataggtcgttctttgtagatagtcttgatctcatcaaaatggacctttacggaaaatcgttcttccagcaatgtctgtatgatttccttttgggtcaaaccatataacgagatttccaattcatcactatatgagtttatggaaaaggacaaagacgggtcttcaatccacaatgtattcagagcggatatcaccttgcttctctcttcgggcttatttggccggacggaggatttgagagcgggatgctgatgagataatccttgaatcaaacaaggtttagcacctaaataatctccgattcgaaaatcttctatatcttctacaatcgcgatatcattggcacccacttcatcaacatttatctctctgccctgataaatagtctttagatttttaatcttgatgaatttttccgaatcgttgattcttacaacgtctcgaagtctcagacttccgtcaattattttaagaaaacttcttttatgccctttggggtcatgctctatcttatagagataagctgaaagtctgtttgagactgatgccggaggaagtataaaagaagaaatggcgtccaacaactcattgataccgatattgaacattgctgatccatgtagcaccggatagactttggcttttgccacaagagcgattatcgtattccaataatcagccggtgaaatttcgctatccgccaaatatcgttctaatatatcgtcgtcatggttgcatacaaattctttgtattcttcctttatatatgtttgggagcaaaccggataaaccgatccatcgacaacagtttgcataaacaggacatcttgcgacagatttgtttttatatccatatacaaacgctccaaattcacaccggcacggtcaatcttattgataaatataattgtcgggatttgcagcttttgtaaagtactgaacagcaactttgtctgcgcttgtatgccttcctttgcggataagatgaggactgctccatcaagcattttgaatgtccgctccacttccgcaataaaatccatgtgtcccggagtgtcaatgatattgcatttcactccattccagataatagatgtcgtagaagcccggacagtaattcctctacgtttctctatatccatagagtccgttatggtgtcaccattatccacacggccgcacttttccgttgctccactggcaaacagcagattctcggttacggaagtttttcctgcatcaatgtgagcaagaattcctaaatttataatattcatttggattaagcaataatatactacagtagatgcattgtcgaaacgcaccttttaatacctcctcgtagcatatgagaactacaggattactaactcgtattaatatgtatattattactgccgcataacgattacaaaattacacaaaaaaatatatctaacaaaagtgggaggattttttaactttttaccatagacattttattagggaagcgtaggttcaactggcaagtacaaataagtagaaatgtttgaacaacaccgttttaggaagttgaaaaatcaagtttctctctcggtatagcgtttattttggccaatatcttctttagtttagcatttgtgtatttcccattcgtgttctatttagctccttattatgagtatgtagcaagttacttatcaaattcagcctctttgagggtcaaatatggttttgcaaatggtgactgacaagacataaacaaggtcagcaggaattttttacataaatggacatgaatgtatataacctaaaataagaataaattttaataagggctgcccaaaaagaaaaaaatgcagttgccatcctatagatacttgcagaaaggataaaatttacttttagaccttttgggatagcccttattaatacttcagataaaattccttaggttatattttcaatcctttggaccgggtttcctccttggcatacagtcccggacgcccgattatgacatggttggcaacgatactatccgccggactgcgtatctgcggcggtgcattttcgggatattgcgcctgcctgttcctcacatcttccgcttccggcttgagctgttgcccttcattctccttttctgcgacttcgggcgtgggtggcgcaagctccagctgaatttttcggtcaagggcggcaagttcggacttcaactgcttcagctcgtcctccttcttccacaccttacccgctatctcctgtaactgcggtatctccatctccagcacctcgttcttcgccttgtactggtcgatgatggagggtatcctctccatcgcgttgaggaagttgcgggcggcggccaacgggtcagccatcgccagatgcccgttgttgtaggtgtacttgtagttcccctcgaccacgaagcggttgtcggtgaactccaatccctctttgagtatcctttcgctcaccacctttatcggaaaaccgtaaagttcaccgacctgcgtgtacaaccctccggtcgtggcattcttggctatctcctgcaaacgctttccgatgaccttctcatcggcggaatccactccgtccacctttattatattaaggcggttgccctccttgtcggtctgcaccaccgacaggaagcggttccagtcctccgtcatggcatctatgaaagccgtgttgttgcgcaactcgccggtctttgactccagcttgaactccgaatcacgcttgcccttgttgaacgacttgcgttccccttcgagcgatgcgatccgcttttccagtttcgccttgtccaacaggtcggtattgccggagagcaacgccatgtattccgagaaattcatgcccgatttttcgtccattgccccctcgtcgatggtacgcgcacccatcgcaccgcttttgagctggcttatgaaagtctgcttgcagtgcaggaggttgaacttgtagctgtccagtgacttctccaccgcgtagatgattacatccacgttgttcccggcgaaatgtttggcaatctcattacctgccctaactccgcgtccgtcacgctgttgcaagtcggacggtcgccacggcgtatcgagatgatggatagccacacaccgtttctgggcgttcacacccgttccgagcatagaggtagagccgaacagcacacgcaccgtcccggcgttcatggcgtctatcaccgccttccgcgccttgtcggtcttgcactcctgaatgaagcgcacctcgcttggcggtataccgtagtcctccgtcagtttgcgcttgatttccgaatagacgttccacccgtcgcccggctggtatgtccccaaatcagagaaaacgaactgcgtgcctttctgggcgtcgtatttttgataatactccgcgatcatcttggcacagtgactcgctttgttgtcgggatgatcttcgtaattcgggtctatcatgcgcatgtcgagtgccattttccgggcatagtccgtggcgatgagcatcttcgccttttcttccgtttccgaaagcggcagcctgcccaacaaggtggcatcgcccgtcttggcgaactgcatcagtttctgtatgaagtcctcctgttccggcgtgggcggtatatggtgcagtatctcgttcttggcaggacggtcaacgcccacatcctccgccgtgcggtagtccgtgatttcattatagaaggcggcaagctccggcactttgatgaagtagcggaaacgctccttctggaccacattgttcgtcacgttaaattcaaaatccgtcgtcttcttggcaaatatcgccgcccaagcgtcgaaacaccttatgtcctgccgttccagctccttcgggcgcaggtacttgaacagcaggtacaattcagtcagtgagttgctgatagtcgtgccggagaggaaggtcgcacccaagtcttttcctgtgcgctcctgtatggtgcgtatggcaaagagcatgttaagtgccttctggcttccctcgctgtttcccaatcccgccacacggtcgtggcgcgtgttgaaagtcagattcttgaactggtggctctcatctatgaagatgtggtcgatgcccatctgcttgaaatccaccacgtcgtccgtgcgtgactttatggcgtgttccaccttctccagcttcgcttcaaggttgtgcttgcgcttctccaatcctttcagcatcgcccgcgacacgttctttccctgctgccgtagcacttcgaggttttcctccaccgtgtcaagctctgcttgcaggatgcgctgctgcaattccggcgactgcggtatcttgccgaactggtcgtgcgacatgatgacgcaatcgtagtcgttgttctttatattattgaagaagcgcacacggttggcggtcgaaaagtccttctccgaagcgtacagaatacgtgcgttgggatatgccgcctgataggtggctgcaatctccgcaacgttggctttcagcccgataatcatcggcttgtgtgccaaattcagacgcttcatctcatgcgcggcgatgcacattatcagcgtcttaccggttcccacctcgtggtcgcaaattccgccgccgttctgtttcaacatccagacgcaatccatctgtgagggatagacgctcttgataccccggcttgccagccctttcaggttgaggtcgggaaaggtctgatgggagccgtcgtagcgcgggcgcacgaaacagttgaacttgcggttatacatcgtcacaagccgctccttgaactgcggcgactgctcttcgagccattcggagaagccgtttcgtatctcgtcaatcttggcgttggcgagttgtattccctcgctgtcgcgcatcttgatgtcgttgccatgctcgtccttgccgatggacttcatcatgtcagggcaggtgttgtgcagggcgtgttttaggaggtgcataccgtcatagttccggtaataccccttcaccagaaactcgtccgtgattttcatggtgcggtagccgcacaccaccgaaaactcgtccatgcttgcggaataggcgattttcacctccgtgtcgaacagccggctcatgtaggcggcatagacacccgtcggaatccagcgttccccgaaattgaagtccagatcctcgaaggcgatgcgctgcggctcggcatctttcagagcctccaacgcctgcttcacctccggcatacgctcattttcgggattgtcacccatccatgcctctatgcgttccgctttctctatgacatttccggcgatgaaacggtctttgatttcgtaaccggtcacgagcggattgtagtagatgcgcccttgcagggcagtgagcaaatcctccgccgtgctgtcggttatctcccgcatatagtcgagattgaccgtaccatatttgttgagcgacgcagacagggcttcttcgggagagcctacgttggcatggctctccaccgcgaaggaaacaggatgctcgaagatgtccgccttgacgaactttccgttttccatccgttccagcgaaaggatgtcgcgcccgcccgcatccatcatcactaacttcacgttctgcttggcgttgaggttgccgtagcgcatgacaaactcatcgtaacaggtattcagatgctctcgccacggaacatttgcctcgcgccggagcgattcataacggtacagacgctcgtaggcgtcacgcagcgacacatacaacaacgccttttccttctggtatcctttcaggtcgagcggctggaatgtcgccccgtatggcgtgatgtctttcaggtagccgatgttatgacgcccccggtcagccaccagcgacccttcgcgcaggtgcatctccggcgtgcggtggtaggcacgcggagaaaggtccacgacttcctccttcggcttttccgcttcgatgtcggggaaaaggaaagtccccaccgcttccgatggggtatctgtaacggcaggtgcggcgactgcctccggctgtgtttcctcctgtcgtggctgctcacgggaagtttccggcacggctttcacttccgtcttttccgccacttgtttctcgttatgctgccttgccagttcccgaagttctttcctacgctccggcgtcaaacccatcatcatttcatagaaaccgttgatgggaggattggtatcccagtccagtgtggcatagatgtcgtccgggtcggcaggcttggcggtgttctccgctttcacctccttattctccattgcgggttttgcagttggagctgtcggtgtaaccgtgactttcggtttgggcggagtggactttgccgtaactgcctttttcaccgtctttttctttttggaggttttcggttggctgacctcttccgtcatcccccagaggtcaagcagggtgagctgcacgcctgcggaatattgcgggcgcggttctatctccggcttttcatctgcgggttgcggcttttctgtcggagtttccaccgtctgcgccgaggatactgtttccaattttatggcaggacgctctactttattttgaacggcaactttttcttccgttcctgcctgccggattgaacccgaatacaagcgcatggcaagcctgtaatggaaatcctcgtcgagcatacggcgcaaatccccggcgatgcctgctgccttgccctcgtgcagataaaccatagcgggcttcccgtaggggtctgtgtcaagtttcgccatcgtatgcacgatgcgttccgggtggtggatgaaataggcgttgtcggtcagggcggttttcgtgtccgtctgtatcacggtcatcagccgctcgtcctgcgacatttccttcttgctgaggttcttttgcaggacaatcaggtcactgcccacctccgtgcccgcgttgtccgtgaacaggttgttgggcaggcgtatcgcggataccagattggcctgactgaacagctcgttacgcacggaggtcttggtgctattcaataccccttgcgaggtgatgaacgccacgataccgccgtcacgcacggcatccagtcctttgagaaagaaatagttgtggatggttttctgggcggagcgtctgccgaaagagtcgctccgctgaaactccgcgtcgaacacggcaatgtcaccgaacggaatgttggacaccgccaagtcgaaataattgttgaacggtctttcgattttctcaaaaccgcaggtgcgcattttctggtcgggatagagatgcctcaagattgtacccgtgagcagatccttctcgaaagccatcacatccgcattggggctgtgccgcagcatggaatccacgaacacgccgacacctgccgacggttcgagcatacgggcggggcggacgctgtaatctgccagcacgtccgcgatggtgtcggttatctctttgggggtgtagaaagcggtcagcacggacgctttcagcgaatccacaaaccgcttgtactctgtttcgtccttgctgttctcacggataagcctgtgcagctccaccgtcggggcgaacagttcgaggtcggatttcgcccaccggacggcatccgtcagttcctttgcagggttgaggatacatttcagaccgccgaaaccgcagtacctttgaagtatggcacgctcttcggttgtcgctgtcctattttccctgtcaaggatgaatgccgtccgtatcgcctcgatgttgtcccgcagtttctgtttgcggttaaacgccatattcgtctaagtaaaggacggttgctcccgtcagctccgtgtagagcaggtcgtaatcggaagacagggcgaaattgtcatccgagaggtcatagacggagaacacgttgccgacaagcggcagcagtttcaggacaaaggcttcacgcttctcttccggcacttcatcggcaaactcgttttccacgacttcgcggaggatggcgtaacgggaataatgcagcccgcgcagcagcgtgtccatcgccagttcctgcgcaccatcggcgggatagccttcaagccgtgccctctcatacgtttcggcggcacggtcggcccgttcccgtatgaaagcggtgtcgtcagcctgttcaaacttgttcgtgcggagatagtccagcaggtacagaccgtaataggaaaagtcggtctgaccctcgtttttcttcttgttgttcattactttggatttagcggattgataattaacgggataatcggttggaaaaaggaagaaaaaggcactcggtatccctccgagtgccaccactaaatccaaagtatgagtgtaatccggtatcgaagaacaattcattactctgaacaagtggcaaagttaatactatttcttccgtcctgaaaatttcttgtcctttttagcctccgggaacacaaaagtcgtgttatattccccgtcaaaggcgacaacagcatcgaaactcttgccctgtttgctcttgaaccctttgagcagcttggtatgcccttcggtgagcaggtctttgatttcatcgtcggacagggtgcgtcccgctttcagccggaacacgggcagtccgcactccgtgttgtcgcagcgtaccaccttgccgtagaaccgcatcctgcccgtgccacacttgggacacgcgcagccggagtcacggctgccgaagagcttgtcgcacgagatcagttcggaggttatctcacgtgtgtacgcctctatctccttgcggaaggtgtcgtcggacagttccccgcgctcgatacgcgccagctccttttcccattcgcccgtcatggcaacatcggcgatgcgcatcgtcttgacgacggaattgagggcaagtcctttttcggtgggaacaagcgacttcttgcagcgttccatgtaaccgcgcttgaaaagcgtttcgatgatggaggcgcgtgtggcgggagtaccgatgccacagtccttcatcgcctgccgcagtgcgtcgtcctcaatttccttgcccgccgtttccattgccgagagcagggtggcttcggtatgcagcggcttgggtttggtctttccttcggtaatggacgagcctttcggtgtcagcgtgtcgccttcctgccagccggggatggtaatttcctctttttcctcgccatagacggcacgccatccggtttgcttcacgacgctgccttttacggtaaactccactccggcacattccgccgtgacagtggtcacatccttgacgcatttctcagagaatgcctcgaccatgcgcccggcaatcatctgatagatggtattgtcctctttggagaggaagagcggtttctcacccgtgacgagcagggcatggtggtctgtcaccttgccgtcgtccacgctgcggcgtgtcggggcggcttttgcccgcaccttgtctttccattcgggctgtgtgccgatgaaagcgagcagtttgggaatttcggcaaacacgtcttcggggatgtagcggcttcccgttctcggataggttatcaacttcttttcgtagagtttctgcgcgatttcaagcgtctgttccgccgtgaagccgtgcttggcgttggcttctttctggagcgtggtcaggtcgtagagcaagggagtttcctccgtcttctccttgcgctcggctttcgtgacagtggcgcaacctgccgcctttaccttattatatagttccatcgccggttctttctctttccatttctcggaggatgagaatttcacgacttcgccgtcgcaaccgtccgttgcgatatggagctgccagaatgcttcggacgtaaagcggcggttctcccagtagcgttcacataccatagccaacgttggtgtctgcacccgccccacggaatacgtgccgtgtccggcggcgatggataacgcctgtgtgccgttgatgcccacgagccagtcggattcgctccgcgctttggcggcgaggtagaggttgtcgtatttgctgccgtcttcgagtttccgcagtccctcgcggatagctttgtcggtgagagagctgatccacaggcgcacgaaaggagtggtgcaacccgtatagtggtagaggtagcggaagataagctctccctcgcgtccggcatcggtcgccacgatgatatgttcgcttgtgtcgaacagtcttttgatgacttttatctgcgacaccacgccgctgtcgggcttgtaacctttctccgtcctgacctgacgggggacgagcgtgaatgtgtcgggaataatcgggaggttgtcacggacaaatccgcgcacgccgtagccgtcgggcatggcaagctgaacgaggtgtccgaatgcccatgtcacggcataaccgcctccctcgaaatatccttcctctctctttgtcgcgcccacgatgcgggcgatttcacgtgccacggagggcttttctgcaatgattgtcttcatgtcttcttcttttttgttgatactttggattttattttggattcagtggcggacacgggattacattttcatgcccttgcccgttttcttctgcggcttctcctgctgctgttgctggcgggcgtccttcgggttggtctgacctttctgcaacggctctctcagattctttgtagcctcgttggtcttgccatcgttgttcaccgccacctgcgtgcggctctcgttggacggagcaacctgctgtgcattgtcagggttcgtgtcgtagcggtacgggcgtcccttctccgggttgaacttgatatacatcgtggcatggaagccctgcttgtcggtcacgttctccagcttcacggctttacccgccacatagtcggctttctgctggtcggtgaagctcacgccgctccatttgctgatggggcggatgctgccgtcctcgttcgtccacgtgttgcggcgttgctccttcttggtctgtgcggcattttccccgccctgcgcctgacttttcgatgtgtcgcctttggtttcctgtgtctgtgcggtacggggcgacttgccggttcccggcacgaactccacgccgcgctgctccacgttcacttgcagggtggtgacgaactttctgccgtcgttgcgctcgatgagcttgtcgcgtacgggcagtccggcgcggagcatgtcccgctcctgcgtggtgatttccgtcttgccgatgcgctccgggatgcgcaccctgcttgccggaatgtccgtgatttcattcgtcttgcggtcgatgctgatgtaggaggggatgatctcgcccgtttccctgtccacaatgtccacgaccctaccgagattgcccgtttcgcggaggttcttccggtcattgtcggagaatttgtgttccttgtactcatccagcttctgctccttgcggatgaagtgcggcacgaggctgatgtttccctcaccgtccttcttgaaggagaggcgggcgtccagctcgaatgattcgccgccgaaggtcggtttgacctttaccaagtcggacttgccatagttgagcatcttcgtaaggtcgccggacttttcaaggttgtcccgctttacgccccatctgtcctccagctcctgccagttgattttactctcgtcgatgggctggtagccacgtttgccctgcatctgttcggatttgtcctgttgctgttctttccgttgttccatgttctcctgtttttgaggttcttgtttctctgtctgttgtgctgccatctcttcctgcaccttcttctcatagtcggaggtgtccaccttgtgaggggcgagcagctccttgttcgcttcggggtctttcagcagttgcttcatcacctctaagagattttcagcttggtctgccgcaatgcggtagaaaccgaagcggctgggttccttgcactgccggaagaagttcttgaagaagttgtccagcacgtcgccatgtcggtcgaattgcaggaaactctgcgcgttctccgcttttgcgggggtgcgcttgggtgtgccgtccgcgttcagcccggctaccacgctgatctcgcctgtcttctcgtcacggactaccagcacgtccttttcgtcttttttctttgccatctgaaaaatgttttaatgggttatttatgaaagaaattatggatacgagccttgtagaaggctatatcttcctttttgaagtccttgatatggttggaaaggaatgtcagcacgtcctcctcgctgtaataggtcttcttgcccagcgtcttgtagggcaatgcgcctacgctgcggtagcgttggagggtgcgtttgcttatctggagcaacatgcacaaatcctgattgtcgaaaaggcggatgctttccgtgatagtgggctgtttcccctcagccttcatcgccagcagcagttcgtcctgacggtcgagccgttccatcagcttctgcatccagccctcgaagttgtttcgtgtgagcagttccatgacctatgtcctccttccttttggtttgccgcccgtgcgcagcgtgtggttgtggaacagggtgtctattgtcccttcctcgttccttactgtgttgtcctccaatagccgcagtatctcggaaaggcggtagcggcagcttccgcgtaccaccacatactcgatacggtggtcggtgcgcatacgctgcatggtgcgcttgctcacgttgagcatcttcgccgcctgtgccgtgtcaagcagcttgtcttcggtttcccgcttccgtttcttctcgtcccttgcctcgcggatgtaccctgcgatgttcgcaatctgcgccatcatctccttgtaggcggaactttccattgttatcactttcatgttcagtcctttctttttgtttctgcgacaaaattcggcaataaacaaaaggggctttaacaactcactacgtgactcacgtaagatttttgcggaagatggctccgtaacccggtcaaacggcgcaacaggcagcctttcagcggaaaacgatacgtcttgtatgccgtttcgttacctttgcggcaaactctaaatgacatgaatatggaaatagtatctatcgagaaaaagactttcgagatgatggtggcggcattcggcgcactctcggagaaggtcgccgccctgaggcgcaaaagcgacacggggcgcatggaaagatggctcacgggcgaggaggtctgcgggcagttgagaataagcccgcgcacgttgcagacgctgcgtgacaggcggcttatcggctactcgcagataaaccgcaggttctattacaagccagaggaggtgaagcggctgataccgcttgtcggcacgctctatccgcacggcagatgatttgatttattcacccactgaatccgaagttatgatgaacgagaacaacgatgtttttacgatggaagacgagccgatagcctctgtggtgcaggatatgcgcaaaggctcgaaatggctgtccgcatttctggaaagctaccgtcctccgctggacggggaacgttacctgacggacggcgaggtgtcggaactgctccgtgtgagccggcgcaccttgcaggaataccgcaacaaccgcgtgttgcccttcatacttttgggagggaaggtgctttacccggaaacggggctgcgcggggtactggaagcgaactaccgcaagccgctggagtgaggcggtttcatgaaaaagtaaacgggtgacaccttttgtggtgctacccgtttacttgtcttatggggtatgtgcaatcagcaatacccggcttttccgttctgtatgaacatcacgtatgtctgccgtttctcttgtgagagtgcctttcccaccagccatgtgcggaacaggtgggtgttgtaggtattcaccctgaaagcgaccgggatgatgatttcaagggcgtacacgtccgcgtgcagcccgttttcaagctgcatgtagcggcacacctcgtagtcgttcagcacgtccgacttgcggacggctctgatggcggcgttcactgccgggacggtcgtatggaacaatccggctatttcggtggcggtcatccacacgtcgttaccggttacgctgactgccttgtcctcgatgatgattgtgtcacgtttcatggcttttctttttagatggtgcaacctgcaaattcctcgacgccgttcaatcttgcggcaaggttctccatgtcctgattgagcttctctttggttatctttgcgtaaatctgcgtcgtctttatgctcttgtgtccgagcatggagctgaccgtttcgatgggaacaccgttggagaggaatatcgtcgtggctgccgtgtggcggctctgatgccacgtgatatgcttggtgatgccgcaacgcttggcgacggcacggataccggcaaggcacgtgttataatgcggaacgggaaatatcctgccgtccccgcacagtccccggtatttgccgattatgcggttggcgatgtcgagcaggcggatgttggacaccacgcccgttttctggcggttgatgtttatccactcgtgttcgtcgaagtaggtgcggatattctcttccgtaaggttgcgcatatccgcgaacgacagccccgtgaaggcgcagaacaggtagaggtcgcggtacaattcctgtttggcgtttttcagtttcccctccatcagcaggcggatctcatctttggtcaggaaactgcgtgttgtttcctccttcttgatttcatactcgcggaacgggtcgcgcgtcagccactcgttgttgatggcgatgaataccatcgtccgtaacgggcagacgtacagccacacggtattggtgcagcagtgcttgtccgtgcgcaggaacatctcgaagtcggagatgaaagccggggtaagctcttttagggcgatgtccttcacatggtagcggatgtcgaggaactcttgcatgtgcttgtaaacggtgcggtacttcagcagcgtgcctttggctttcatgcctgcctccacctgcttctcgtagtcctcgttgtgctggcggaacacctgcatcagcgtgtggtagcggtgttccagtccgagaaaggcgttcttcaccttctccgccgtgacgaagttgtcacgctccatgatttcctgataatgcctgttgatgcgtacccgcatcttgtcaagcatacggttcgtttcgagtgccgccgtgcttctgcccgtgacacgtccacctttggtgtcccacagtttcggatcgacagtcagtttgcagctgaactgtgtctggctgccgtccaccgtgatgcgtcccatgacgggaactgtcccgtcctttttcactacctgacgcttgaggtagtagattactgaaaatgtactcttcattgtccttaatttttgggtttcaaaattagttggtgaagagtccggtgttggtacgcaaaacggggaggaacggcgcaatctttttccgtaacctgatttttcgcatgagttatggataactcactattccttagagccttgtttcgctattcgtacccgtttgtcgcattttcgggcatggttacgaacaagtaacgtagcggcgtcaggatttggcttcggcagggattgtaatggcttcacggattatcgccacttcaaccaaaacccttgtaactcaattctatcactatatctttccgcatttcacttttttgtagtaactttgctataataatgaaccggtttatgggaaatccgacgaaaaagctcccgctgatcgagcgggacgactggctgcttccggtcgaaagggagttgacggcccggtacgagagctacctgcgggcacttcgggaaatagaaaaatcggccggatcgatcgtcgattacgccaacggctatcgctatttcggatggcagcgggacgaggcgctcgaaggctggtggttccgcgaatggcttcccggggcgcaggacgtttatctgctgggcgacttcaacggttggcagcgcacttcgctgcggctcgacagaaacccggaaggggtgtggagtattttcctgcccgatgcgatgtatgccgaacggctcacgcacggctcgctctacaaaatccacgtacatggcgacaacggctggcacgaccgcatccccgcctatgcgacccgcgtggtacaggacgagaaaaccaaggatttcaccgcccagttctggaatccgtccccgttcgactggcagggtgaccggcccattgcggcccgcagcgaggaattattcatctacgaagcccacgtaggtatggctcaggagcgcgaaggcgtgggcagctatgcggaattcaccgaaaagattcttccccggatccgggaggagggttacgatacggtacagttgatgggcatcgccgaacatccctattacgggtcgttcggctaccacgtgtcgaacttcttcgccccttcctcgcgcttcggcacgcccgaagcgctcaagacactcgtgcgcacggctcacgaactgggacttgcggtggtaatggatctagtgcacgcccactacgtgaagaacctcaacgaggggatcaacgagctcgacggtacggatcatctctactccctaccgggtacggcgggcgaacagccctactgggactccaaaactttcgattacggcaaggaacaggtgcggcactttctgctctcgaacgtcaaatactggctcgacgaatttcacttcgacggctatcggttcgacggagtgacctcgatgctctaccgccatcacgggcacaccgacttcgtccggagggagcaatatttcgatgaggaggtggacgaagccgccctcacctaccttacgttggccaatacgctggtacacgacttccgtccccgagccgttacgatcgccgaggaggtgagcggcatgccgggcatcgcggttccgactgcagacggaggcgtcggtttcgactaccgcctgggcatggccattccggatttctggatccgacaactcaaggagatacccgacgaacagtgggacatacacgccatttggcacgtcctgaccgaccgtctgcccggcatcaagacggtcgcctatgccgaatcgcacgaccaggcgctggtgggcgaccagaccctcgcgttccggctgatgggaaaggagatgtacgaacacatggaccgcgcctcgcaaagtccggtcatcgatcgaggcatggcactgcacaagatgatccggctcgtcacgatctcggcgggcggggacgcctacctcaacttcatgggcaacgaattcggacatcccgaatggatcgactttccgcgcgagggcaacggctggagctacgcctacgcccggcgccaatggtcgctcgcggacaacgggctgctgcgctatgcccagctcggggagttcgaccgggcgatgatcgccctggtgaaaaaatacggcatactccgcgacggctacccttacaatttacagatggacacccagaatcagacgatggccttttcgcacggcgacctgctgttcgtattcaactggcatccgtcggcctcgatacccaattacgaagtacgggtacgggttccgggccgttaccgcccgatcctctcgaccgacgagcgccgtttcggcggcacggagcggaccgacatgcgggggcagcatttctcctaccccgtgcagggggacgagctgccccgcatccgcatctacaacacctcgcgcacggcgacggtcttccttcgcgaagagtgatccggacacactccctgcgccgtgcacggggccaaaaataccggataatgcccggaaaacagaaaaaatcgcaaaaagacagacaatacaccgctgccgagcgggatttcggacaacaaattcaatacaatgacgaaaaaatacagacatctcctgttcgacctcgatggcacgctcacagacccgatggagggcatcacccgttcggtgcaacacgccctgcggcatttcggtatcgaagtgagcgacctgcgcgagctctgccccttcatcggaccgccgttcgcggagtccttccggacattttacggcttcgacgaccgccagaccagcgaagccgtagccgtatcacgggagtatttcaccgaaaaaggcatcttcgaaaaccggctctacgacgggatggacgagctgctcgacacgctcacaagcagcggatatacgctctgcgtcgccacgtcgaagccccgggtattcgccgagcggatcctcgaccacttcggcatcgccccctatttctccttcgtcggcggcacaggactggacggctcgctgccgacgaaggccgatgtgatcgctcacgtgctggccgggagcaacatcaccgatcgcggaaccgccttaatgatcggcgaccgcaaatacgacattctcggtgcaaaaaccgtcggcatcgactccgccggagttctctacggctacggcgaccgggcggaactggaagcggccggagccgattacatcctccccgcaattcccgacctggaagagctgctgctcgaataaacggacgaaataccgggaaacagagggattgtctgacaagtcctattttaacgttttcacccccgtcggaataaactccggcaggggtgattttcaatttcgggaagttatcgaacagccctttcattcagttgcgggcaaccttgaaagcctactttttcgctgcggccgtacggcgggcaatgtcctcggccgtatgctgcacctggaagcaaaggttcgacagatcgacgccctcgatccggcggccctcgacgacgatctcgccgttcaccacgacggtatccacgtcggcagccttgccgcagtagatcaggttcgccaccatattatataccggcataaggtgcggcttcaccgcatcgatcagaatgaaatccgccagcgcaccctccttaataacgcccaactcgccggcatgaccgatcgcacgggccgcattgacggtcgccattttcagaatttcataggcaggcagcacgcagggatccatcgtcgctactttctgcaagaacgatgcggtacgcatctcgtcccacatatccaggtcgttgttcgaacaggtaccgtccgtgccaatcgtgcaaagcaccccttcgctatgcatccgggcgatcggggcgataccgctcgaaattttcatgttgctctgggggttgtgcgacacggccactccgcgctcccgcaggatgcggatatccccgtcatcgacgtgaacgcaatgcgcaccgatcgtccggtcgtcgagaataccgagggtatcgagatgccggacagaagtagtaccgtaacgctcccgcacgatacgcacctcgtcttcggtttcggaaatatgggtcatgaaccagagtccgtggcggcgtgccagctccttgccccgctgcaacgactccggcgaacaggtatagggcgaatggggcgccacggccaaccggatgcggtcgcagtcgcccgtggtggcgatcatccgctccacatcgtcggcaaaagcctcccaactcgtatccaagtagctcgctccgagcatggcccggatgccgagccgccgcacggcctcggcgatacggttttcgtgccagtacatatcgacgaacgtcgtgacgccgcccagcaacatttcgacaatacccatttcggctcccagtacgatttcgtccggggtttgctgtgcctcgaaaggccagatatattcgtgcagccacttcatcagggcgatgtcgtcggcatagccccgctggagggtcatcgccacgtggcagtgggtattgatcagtcccggcatgagcaccttgcccgtgccgtcgatctcccgcaccccgggatgctcccgccggaacgcttcgatccgccggggatcgtcgctgaccagcgccagacggcgatccgccacgccgaccgcccccgtgaaagtccggggctccttctctgccgtcatgggcagaatcgtacagttcgtaaataacagttccataagcaatacaggttcgacgcaatcggaattacaaaccgggcggttatcgtcaaaacggcatacgtcgaactattttacggtgttcacgcgaacatccgatcccattttgacatcttctcgaaaccgcccctatcaaagcgccccttctatcgatcgcttccgggacgtacccctttccggcaccggatcattcggtatccagagagttcccgcaaacggtaatcagctcccgccccgaaaccgaattggaatagatctggatcaccttgctgaaagtgcccggttcgttcttatgcggttcatagaccacacggatcacagcagtttcgcccggtgcgagagggcgcttggagtggctcaccttcaggcacgagcaggtagtctgcgcccttactattactaacggagcagagccgtcgttcgtatattcgaactcccaaaccagatcgccgccccaacggggtacgctcccgaaattatggaacgaactctcgaatttcaggtgcgctccctcgtattgctgggcgccggccccgagccatgcaaggcacgaagccgcaatcaataatatcgtacgtatcattcgtgtcgttttcgcagccatcgtccgctgctgttatcgcgccttcagtcgatgcggtgcaacgtcgcacggcaaaccggattggcagcgcattccaatctattccaacgtaaagacataggtaatcgttccggtctgcatcaaactctcgctggatgaaaaccgagctttgcgggccgcttcgaccgccgcatcgaccagccgcttgctgttggtcgtcgatccctgcgcccgataggaggcgtatgtcacccgaccggaagcatcgacagtcacatcgacgacgaccttgccggactcattgcccggataggaaggcttgggcagctttcccaccaccgagcgccccgaaaggtcgtaggcaatgcccgaatcgctctggcccgtgccgtcgtgactgccttccggcgcccccgaaaggtccccggcgttaccctcgcccgcagcaggcccctccgacgtggaagtgctccccgccgtgcggcccgggaagagcgcccgacggtttaccgtgcggggttgttcggcaggctgctgcgcgtcgctgcgctgcggagtttgtcccggagtctcccgctcgcggggtttcttctccggctgcggtgtctgcacggcgatctcctcccgctcgctggtcacgtactcgacctgctgccgcgacgcttcggccgccgcctgctgcggcggtgcctgcacatcggtagccgacaggtcccggtcgcccagaccggtttcggtcgtcccgaaatcgatcagcaacccttcgccgggaagcagctcgtcccgccccatatcgaacgacacgaacaggaaagccgccgcgatcgacagcgcataaagcaaagctgcgaggctcgcccaacgacgcgcgttcgatttatcgttattcggatcgtaataatacatcggtcaattctcacaaggaaaacaccgcagggcggcattccccgggtttcactctattcgggcgaggtagccgcgatgagcgtaaaattgttggccttggccatgcgcatcatggccaccacttcgtcgaaagccaccgacttgtcgcaatgcagcgaaacggtagggttctcctgtcccgccagccgggacttgagggctttctccacgccctcgcgcgagccgacgttttccgtctcgacataatacctgtatccatgtcccgtatcctggatcgaaatcgtcgtcatcgccttgtccttcaactgattcgaacttttcggcagaatcagcttgatggcattggggttgatgagcgtcgtagcgatcagcatgaacagcagcaacaggaagatcagatcggtcatcgaagccgacgaaaacgacttatcgaccttggatccgcgtttgattgccataacagattacttttgaacgggttgattcagaatatccataaaggcgatcgagttggcctccatccggaaaacgagcttctcgatgcgggccaccaggtagttataaccgaagtaggccggaataccgaccagcagaccgccgaccgtcgtgatcatcgccacgtacataccgctcgaaaggagcgacatatcgaccgtaccgcccgcagcggccatatccataaaagtctgcaccatgccgaccaccgtaccgagaaaaccgatcatcggggcgccgccggcgatggtcgccaggatcggcaggttggtttcgagcttcgacacttcgaggttcgccacgttctcgatggccgactgcacgtcactcatcggacgaccgatccggccgatacccttttcgatcatacgggcgatcggcgtattggtcttgcggcaaagatcgaccgcagcagcgaccttgccgtccaaaatataatctcggatgcggttcatgaaattcatatcgaactccgacgccttacggatcgccatgaagcgctccacgaagataaagatcgtgagtcctcccagaatcaacaaaacccacatcagccatccgccgctcataaacaactgccaaagtcccatgcgggtctgctccgcgacaacgaccgcatctgcggtctgcaacaaactaatcataatctttttgagtgaattaaatttattttattcgagttttactttttccgtatcaatcccgctccaagtcgtattcaggctccggcggatcttccggcagaagcaattcctgccgttgggcctcttccgccgcacgccgggcctgctcctcgcggcgggcctgacgctttttctgacgtttcttgttggtgaagcggtcccgaatacgctgtttcagatccttgaaattattgaaatcctccttataggagatcccgataccggtttcctgcaggccctggttctcgtcgaaacgatcgatggtctgcgtgaacgccttcagacgcaggttgcccgacttgtcgatcagccacgtcacatgcgcttcgcccatgaagttggaaacattgttgcttacggcctgtttgttgtcgatgatgtagttgccttcgacctcgaccagcagacggttgttgatcaaattggtggagaagccgaaatccacctcgtcaccggtcatttcggagcctgcccggtagttcaggatgatccggtaatcatctgtcgaaaaccagttggtaagctggttggtaagcatctccagacccgttgccacaccggaagaagcaccgatattggcactgccggaattgctgaaagtacccagtgcgaccagcgaaatgaactgctgcgcctgggcttcctgcgtattgagcacgctggccaccgcagcctgcgtttctatatctgtaacgggcacgaccacgctgaaatccaactgcgggttgctcaaacgaccgccgatatggatcttacaatcaaccggcaccgaacggtccgaaatccgggaaccgctctggtcgtcgtccgaagaggcggttacagtgttcaacagaggctgcaacgacgttttgagcttatagacggcattgatgtcgagccgcgcatcgacaggctcgcccgtccactgaatcatcgaaccgctctcgatgatgaattttttagtaatgatattctgcaatgagaaaagaaaactgccttcgatgagcgtatagtcgccgtacatattgaagataccgttacccggattgatatgcaggttgagcataccgttgccacgacctttcagggcactgccgaccgtcgggtcgatcaccagttggaaagcggtattgtcctgcacattgagagccatcgtaatatccatcgtgctgcctgcggcttcctttttacgcccctgctgctggaagagcagcttcttgcgcaccagatagtcggtcgtatcgatctgttcaggggtgacgaacgtaacgaaatcggccgttttcgcattcgactgtcccgacagaggcatataaaattcggaatcgccttcggtggtagccacgatgtccattttcacaccgcccttgctgcccgcgatcgtcgccgaacccgaagcgaaaatccggccgtagaacaggtcgttatccttcgaagtggtattgagcaccatcaactctttcggcagcactttcaccgaataggagatattggacaaatgttccagattgaggtcgatcgagaaaaggccctcgttcttctccggatcgtacagcggcacgccttcggcaatcaaatgattgtttttaacctcgatcacggtccggggcatcgtgtaggtcacctgcgtaaaatccaccgtcgtggtgaaatcgcgcacggcgatctgcccggaaaggttcgcctccttaccgctgccgcgcagggcgatatcgacatcggcattgccgccggtccgctcgaccacccccttcagcaggggatcgagcgccgaaagttcgactgcgtcgagggtagcccgggcgtaataacgcttttgcgaaggggcgtaaaaaccacgaacgagagtatcgagattttcccgctgctgcaccagaatacccgcgcggttctgtatgaaatcccatcgggaccgcagccagatcgacggaacggcgagatcgttgatcgaaatgctgtccacaacgatatcggcctgcacctcgccggccccgagcaccgctttcatcgtcgccgaaccgttggtacgaccgtccacacggtagcccatcgacgaggtgaactgcgagaagggcgccaactcgaaattatgcagcgtcaattgcaccgaatcctgcaaacgacgcgatacgacgccgtcgagcagcagttgctgcccggcattgaccattcgaaaacggtcgattcgtatccgggaagtatctgccgtaataccgtccgtatagatattccaagtcttctctccccggctgatgtacgacggcgtcagccgcagatcgatctgccggcccgcaggacctcgtccccgggcaaattccgaacggaatccgatccgtccggaaacatcgccgatagtatccgcgaaatcggtaatcagctccagcttgttatccttggcccctccgctcattccgacacggctcatgtgaaaactgttcagataaaggtcctcggtcgaagccgcgaaaacgagcgagtcgccccggttgtgggcatccagattcagacgtgtcaccagcatccggccccgctcgatgtaatccgaggccgcttcgaacgaaagtttgtcgttcgccgggttgatccgcaacagcaaccgcgatccgtccgcgatctgtaacccgggagaaacggcattgaccagcggattgatcttccggacattgaccgtaagttgggaatatccgtcagccaactctaccgtatcgggatgctgcgcctgccagccgggaccgccgtcaagcgtcgggacataatctcggaaacgctgttgcaggtaggcgaacacctccttgtaggaggttttcccctcgtagtcggcatcgacaaaatcggaacgcagacgaataaacttgtccgacaagctgttccgacccacgatcacaacgctgtcggccgcaagctcgcggtcgttataacgataggatacatcacggacgaagattattccgttcaggtcgtcgagcgtacggccgacggcacgcgcagcaatccgggcggcaagcaccgacaccgaatcgcggcgattcacccccagagccgccaggttcgcctcctcaaggtccagcgcaaaatcgtagcggggcctctgctcatcgttcaggtcgagcagccctctaaaatcgaaccgcagattcctgtcccgggcttcgatcaatccgttgaactcccggttcaccaggtgccccttcatacggagcgaatcgtaatcatatccgttgatccccaatcgcaggatctcgcccgacacttcggcgtcggagtgttccgagctgagttcgccgtttacatgcacattcagagagaggggaccgagcagatcgttttccagcaactcgcccagttgcagactggacgttttcacatcgcccagcacaccgcgacagccgtcgcgcagcgagctcacctgcaacaggcaggtcgcaccgccgatctcggtcgccagcgcagcatccgcagcaaaggccgtgagcgttccgtcgaatttgccggtaagaccgattttgcccgcattttttgcaatacgcagcacctcgtcgggcaaattcttgcctgtgagggcagccgccagccgatcgacatccgccgccgaagtcgtcagttcggaaatgtcggccttaaaatgcccctttccgacatcgggcagtccctgcgccgcaaaatcgaccgacagtttcgtgtcggctcccgtgcggaccgagcgcagcgatcccgacatatcggccacagggccgctcacatcagcgttcacgtcggtcagcgtcaggtgccaatccttcattttgggcgagaaataggcgatgtcgtcggacgacagcgtcgtattgacgacctgcgccgtgatgtccacctcctcgacgaaatttttgtaaagggcccagtccaatccgatcaatgaaagcgaaggcaactcgatattcgacttcgccgtccgaatgtgtccctcccggatatcgatacagccgttggcgatgcaaagacagcccgccaggtcttcgacgacaaatccgctgcgctcgcgcatcgccaaacgcccgatgtcggtatggatcaccggaccgtcgatggtgaaattcttcagttcggcccggatgtcgatcaggtgcatatcggcgaaatccaccccgtacgacggattgcggtgctccagccgttccatgctgaaatccagcccatccgtttccagacgctcgatctccagcctgaattttccctccgcccgggccttgtcctttttggaaagtttatcgaccacctgcttgatgttcatctccccgtcgggagtttcgcgcaggcaaaaacgggcgtccgacaattcggcccggctgaaaacgagccctcccccgaacaggccgaggctcttgatccgggcatccagacggccggcataaagcaacgtatcccgttggaaatcctcgacatagaatccgtcgagcgaaacgcggtaaaacaagcctatatccacccggtcgatactgatgcgggtgccgagcttgcgggagattatttccgtcgcctcccgagcgacgaaattctgaacggcaggaatctcgaacaacaaggcgaccaacagaggcagaaagatcagcgccagcacgatcgccgacaccatcttggccagtatgttcactatcctgcgcattatccgacaaaaccgtttttaataaattgcaaatttaagcaaatttcgggatttaacatccggcagaccggatatttatcgttaaaaatcaccgttcgaagaacttgccgcgaagccctcccgcaacgaccggtaaaaatctgtgcccggtacaatacagaaccgcaaacctgttgccaatcgcatttcggagtttttccgaaacccggacagagacccggtatcggctgccgcccgaaataaatacggacatcggcgaatcatttcggattttattccgtatctttgatttttattcggataattccgcctcggaaaaacacaaataaatttgcttttgcgctcggcttattcgtatctttgacatagtcttggataggatgtacctcggaaaaatgggaacaagttcccattttctctcggctttcactatctttgtaaagttttttgccacacaaaaatcacatggacattaccattttaggcatagaatcctcctgcgacgacacttcggccgcagtcatccgcgaccggacgctcctctcgaacgtaatcgcctcgcaggccgtgcaccaaaaatacggcggcgtgatcccggaactagcatcccgggcccaccagcaaaatatcgtcccggtagtcgatacggccctgaaagaggccggcgtgacgatcgacaagatcgacgcgatcgctttcacgcgcggccccggtctgctgggatcgcttctggtgggcgtatcgttcgccaaaggactctcgatctcccacgacattccgctggtggaggtcaatcatctgcaggggcacatcctctcccactttctggacctgcccgaccgacagcttccgcaccccgactttccgttcctctgcctgctggtcagcggaggacatacccaaatcgtaaaagtggacggtccgctcgacatgcagatcgtcggcacgacgatcgacgacgcggcgggcgaagcgttcgacaagtgcgccaaagtcatggggctgccctatccgggcgggccggtgatcgacaaactggccaaggagggcgatccgcacgcgttccgcttcgccaaaccccgcatcgagggtttcgactactcgttctcgggactcaaaacctcgttcctctatacgttgcgggacgaaatggccgaagatccgaatttcatcgagaaaaacaaagccgacctctgcgcctcgctgcagacgaccatcgtggaaattctgctcgacaagctcgtaaaagcctccaaggagtacgggatccgcgacatcgccatcgcaggcggcgtatcggccaattcagggctccgcaacggcatcacggaggagggaaggaaacggggatggcgcaccttcctgcccgaattcaagttcacgaccgacaacgccgcgatgatcgccctggcaggatactaccgctacatgaacggcaatatcgcaaccctggacatcgcacccgtggcacggctcgaggagctcgaactgaccgtcgcaccgacagcggaacaataacagaaatacaaactgtcccgaccctacatacaatatttttacgggcacccgggatccaaaacttacaaaaagctccactctccccgcacagagccgcctttcgggaaaacctgaaaccgatcgaaacatccgctcaaggagaaacttacgaaaaagccgaatcgacaaacgatacgacacgatcggcgggcacgacgtacggagagaaaggaaaaatataaattcaaagcaactttaactatgaaaacattgaaaatcggcgatctgctggcccgtcttcccatcattcagggcggtatgggcgtaggcatctccctctcgggactcgcatcggccgtagccaaccaaggcggtgtgggagtgatctcctcggccggactgggcgtcatctaccgggaacactccaaagactacaatacggcaagcatctggggcctgcgcgaagagctgcgcaaagcccgtgaaaagaccaaaggcatcatcggcgtcaatgtcatggtggccatgtccaacttcgcagacatggtcagaacggccatcgcagagaaggccgacatcatcttctcgggggccggtatgcccctcaacctgccgtcgttcctgaccaaaggcagcaagacgaagttggctccgatcgtttcgtcggcccgagccgccaagctcatctgcgagaaatggctcgccaactacaaatacgttcccgacgcgatcgtggtcgagggacccaaggccggcggacacctgggctacaagccggaacagatcaccgacgaacacttctcgctggagcggctgctgcccgaaatcgtttcggaagtccgtcgtttcggcacggcgcacgacacgcacatcccggtcatcgcagcaggcggcatctacacgggcgaagacatttatcgcatcatggagctgggcgccgacggtgtccagatgggcacgcgcttcgtcaccacggaggagtgcgacgcctcgacggagttcaagcggagttacatcgaagcctctcaacaggacatagagatcatccaaagtccggtgggtatgccggggcgggccatccacaactctttcctggaacgggtgaaacaagggttgaaacagcccaaaagctgtccgttcaactgtatcaagacctgcgacgtaacccacagcccctactgcatcatcatggccctctacaacgccttcaaaggcaacctgtcggcaggatacgctttcgccggcgtcaatgcctggcgagccgaaaagatcgagagcgtgaaagagctgatgacgaaccttatcgacgaattcgaccgtttcagcctgaaaaaacagttggcgaaactgaaaaaataacgttcgataaaagtacaaaatccgtatgacaccttccggtattgcatgccgaaaggtgctcattttcccctatctcaatttttagaacctgctcgaattttatgtagagattatttgaaagctgttttcgagtagattcttttggggaggttgcgtaaatagcgaactattttcagcacctgctgaaagaagatgcagaaaagaggttcaaaaaagccgaaacattttctctcggccaatgtctaactcatttataaaattcaaaacagactcttaaacggaaatcgtccgccccggctttttatacggcgcagacacacgaatcgatctgctcccaatccaatctaaaaagacgtaacacaatgaaaatatgaataatagtcttttatttccgcaatgaacagaatacatgcggtataaaaaacgaagccgtttgttttatcctcccctcattttcactacctttgcgccaccatttttcaaccttaaaattaaccttaaaataaaaattcggagatgatcgaattcagacccgcacttctcacatccctgaagcactactcccgggagaaattcaccgccgacctcatggccggcatcatcgtcggcatcgtggccctgccgctggcgatcgccttcggcatcgcatcgggcgtttcaccggaaaaaggcatcatcacggccatcatcgccggcttcctcacatcggcgctcggcggcagtcgcgtacagatcggcggccccacaggtgcattcatcgtgatcgtctatggcatcatccaacagtacggcatcgagggactgaccgtcgccacgatcatggcgggcgtattcctgatcctgctgggactcttccgcctggggacgatcatcaaattcattccctacccgatcgtcgtcggtttcaccagcggtatcgccgtgacgatcttcaccacgcagatcaaggatctgttcggcctcacgacccccgaaatgccgggcgacttcgccgggaagtggatggtctacttccagaatttcgggacgatcgacctctgggcaacggccgtaggcgttatcagcgtcgccatcatcgccctcacgccccgcttctcgaaaaagatacccggttcgctgatcgctatcgtcgttatgacgctggccgtctatctgctgaaacgctacgccggaatcgactccgtcgaaaccatcggcgaccgattcacgatcaactcccaactgcccgacgcggtcatccccgccctctcatgggaagggatgaaaggactgctgcccgcagctatcaccatcgccgtactgggcgccatcgaatcgctgctgtcggcaacggtcgccgacggcgtgacgggggacaagcacaactccaaccaggaactcgtggcccaaggtatcgccaacgtggtgacgcctctgttcggcggcattcccgccaccggagccatcgcccgcacgatgaccaatatcaacaacggcggccgcacgccggtcgcaggcgtcatccatgccgtcgtactgctgctgatcttcctgttcctgatgccgctggcgcaatatatcccaatggcctgcctggcaggcgtgctggtagtggtatcgtacaacatgagcgaatggcgcacgttccgggctctgatgaagaatccccgctcggatgtcgcggtgctgttggtcaccttcctgctgacggtcatcatcgacctgacggtggccatcgaagtcggactggtactcgcctgcctgctcttcatgcggcgcgtgatggaaactaccgacatctcggtcatccgcaacgaaatagaccccggtaaggagtcggacctcgagtcgcacgaagagcacctcatcatcccccgaggcgtcgaagtatatgaaatcgacggtccctacttcttcggcatcgccaacaaattcgaggaacagatggtgcagctcggcgaccacgcacaggtgcggatcatccgtatgcgaaaggtccccttcatcgactcgacgggcatccataacctcacgaacctctgccgcatatcgcaacaggaaaatacccgcatcatcctttcgggcgtcaatcccaaagtacacgaagtcctgcacaaagcgggattctactccctgctgggcgaggaaaacatctgcccgaatatcaatgcggcgctccgacgggccaaagaactggttgtcgaaccgaaagagaaatagctttcccgcaaaacaaatctacccaggctccgcaaagcgagtgcaaaacaaaaataccgtatcgattggtatcggcaagggacatgttaagatgcggggaccggataaatccggtccccgcatcttttttacatcggagaacaacaataaacaacgcctctttttttaagcgcaccaacaaaaaccgttacttgcgcgtataatattcgacaagcatctcatcattgccttcatcataaatccatttcatctccgaaacggttatttcggcccggcagctctgtttttcgatcccgtcgtccgtcaccaacactcccgacgcttcatcataagaataagtcccgtcataatactcttcgggcgggaaatcgtaataacgaaaagtcccgtcttcccgaaatacagcgatcatcttatcctcgtcctccacagccgtaaaactgtcgatcatttttccattccgataatactcgttcttctgaaacacccattctccgacgaccgatccggactcgccgttcggttcgtctttttcatcggaacaggctgcggtcaaacaagccaaaacccacaggctggcaaaaaacagttttttcattgtcaatcgctatttaatttggtcatatacttttccacctcgaacggcactaatcccctgtcgtatcgagcacaaagcaaaataaatacttcactgatattctttttaccagtttaccgggccttatacctcgttaatattctgaaaatccacgagcaatttcttcaataaaatatcatcaaccaataactacttgtcaataaaatccttccaaacatccgccagatcgaatttcattttcatcggaattttccgcccgtcagggtcttcgaccgtcaaattgaaatgaaggatacaacttttgacatcgaatgcagtaaaacctttggttacggcatcgtcgtcataaatcgacatgacaacctcaaaggacttcgtttcttgcggtttccacggattatcgaaagaaacattaggaaacatacattcgtatctggaaaacatcccctcgtctcttctcaaaacgtactctttattaaagtaaaaggaaacccatgcagccaatcggtcgcggatgtaaggttccccaacccaatcttctcctgcgatatattcttcataaaattcagcgtcgataaatgtgctttgcgacacattccggaggtcggctttgaaagtgaatataacttgatcccaacgatcgagttcgaatttacacaggtaaggttcgacaacgatcggttgcgattcgcgtcgtttcagctcttccaattcgcgccgttgagtcaattcgagcgtattcttaaagttggaaatcatcgtcccagccagtttatccgccccggaacgtaacgttttgcgggactcgaggcgcttgctctccatatagtgcggttatgctgaatgcatttccgaaatttatttccgtcccggacgaaataacaaatacgaaggattgaggtttttcaaagatcaattgtccccattcactttcgagcaataacccgccatcggatgttctgtcaggtttacttctatcttgtgcgaaaattatttgctcggcatttgatgaatacggagattccattacgtaatagatggaaacaaatcctgtttgatccgcttcggagataatgatgcttttcatcggatcatttgaatcggcaaaatcatacgttccttcgatacgcaaatccgaattacaagagatgaaaggaacgacggttaaatataaaatatacctatagataaaagatttcataattttattgccacataaatataaactacaatggccaataaaataatagaacagacagtccccagatacaaaataaacggaatttctactttgactttctgttcgacccgagctatctccaaaccgtctgccgtatgtttcggcaactcgtcgaatccacctttaaccagcccgcatttcggacatacagtcaatccgtccggcacggaatttccgcagttttgacacttccagcgatcttctatcatacaatcgaatttcttgctgacaggcgccgattcaacccatttacaaaaaagaaaagcgtggagtcgttcgtttatccatcaagaggcattcggcgtggcccggaaacaaataaacaataccccagtatatcgagaaccgatatagctatacacggtgatgagtgttcgtattgccatccttgtttcctaaaaatcgccaaattttcttgataaggattagcgaaacactttcactaaacaatatgtcgccatccgcggggacggcaccgcaaagttagtgaatgttttccaatacacaacacactgtggagtattgccgccgcaaagatcgtggaaaagttctaaaataccaatggtacgacgcgtgctcttcctttattacggatgcatcccgtccgttttgctccgatcggatacctcttccctgaggggacattcgccgatcgaaaaaagccgggattcctttcggaaccccggctctccatccaaattaactaacccatatataactatttgacaggtttttcttccgccttgacccggatctttccgaatcctttgatcagctcctcgggcgaggtcttggcactgtcataggtcacggtcacctctttcgagggaacatcgacctgaatatccttgatccccttgccgattaccggcacgttgttcataatgcgggccgcacagctttcgcaatcgatatcgaccgtgaacaccgtagtaacgatctcgcccttcttctgcggcgtcttcgcttccacggcgaacaccccgcatcccaatactgccacgaggcagcacaaaatcatttttttcatcgtcgtataactaatttaattcgttctttcaatcaataaaaattgatacgcaatcccgcataaaacttgcgccccatcagaggtccccagatcaccgacgagttgaaacccgccgagaaaggatcgtccgcattcagaatcgggtgcttctgcttataatcgagaatgttctcgcagcccacgtaaatatcgaacttgccgactttgcgggtcacctgcgcgaagaacatcggatacgtcggcgacatctcggaatcggccaggtcgcccgtctgggtcggcaggcgcgaaggaccgttgagctgagccgtcacatcgaacacccagcggttgtagcgggtcgaatactgcaagttgagcagcgccttgtaacggcttaccagcggacgctccacgagcgccgtactgccgtccggacgatcgatcgtcatacggctgttcgtatagcggtacgtagcgaaaatatcgaaccgctccaccggagtccacgaaaaatcgacctgataagtatcggtaaaggagcgtttgtccgagctgtaaatataaatgtcgttcggcgaatactcctgatcggcaatcaccgaattataaaattgcgtgcggaagtagtcgaaactcaacgtcgcgtcctcctctttcacgagcgtgaaaatctgcgtcaggctaccgcctgcggtgagggctttctccatccggttgagcgctttgaaattgcccgcaccgccgtctgcgaccatccaggtcgtatatcccccgtaagcagagccgggattgagcggaccgcgcactgcggcggctcccgccgaaaaagccgtcggtctttcgaacgtaatatgccgtcccgtagccagaacgccgatgttatcggtgatgacgttggtcgagcggtagcccagcccggccgaaccgcgcaggatcgtcgtcggggtgatgttccacttgatatgaccgcgcggagtaacgtagaacttatcgtaataaccgttgtagtccccgcgtatgcccgcaactacggagagcttgtccttgatcgtgtaggtatattcggcataggcgcctacctcattctcctgacggtcgagattccaggctccggcggcatccagccacggcgtcgggttgagcagcgactcgtcgaggaattgcaggtgcgactgcacgccgacgatcagcgaatgacggaaggagaaatagtgattgtacatcatgttcagcgaaaccatgttgtccgtaccgtcgtaatcgttgagtccgaagtaggcccgttcgcggaagcggtcataatcggccacgaaagcgatgttcgaacgaagctcgtcctgctggtcctcgtcatagacaccgggaccgaccggcataccgaatttgaagtaggcgttcagttcgcggttcttgatctgcgagccgtacatggcccccttgtcccagtcggtatccatctcttcacgcatcgaagccttgtagtgcttctgaccgctcaagcgattttccgccagatacttgaagccccaccgcacctgcgcaccgttgtcggccgtgtaaagccagcggtttgcaaccgctcccaggcgggtcttcggcagatccataaatccgtcgccgttgtcgtccatgtcgcccagcaaatgggtgtccaacgatccgtgcaacaggaggatcgtcgataatttcttatccttggtcacaggcagcgccgtcgaaaggttcagctcgggacgcagttcgtcgtcgaggtagaagttgatgaacagccgttcgtcgtccgtaggtttgcggtgttcgaggttgatctgtccggtgatggcctcatgtccggccgtcacggacgaaatacccttcgacacctggatcgaattgagccacatgcccggcgtatagctcaagccgtagggagcgctcaagccgcgcatgatcggacggttttcatccaatatttgggtgtaagtgccggccaaaccgagcattttgatctgacgcgcacccgaaatggcgtcgctgtaaccgactgtcaccgaagcggagttctcgaaactctcggccaggttgcagcaagccatcttgcagaggcccgcgaaggagatcatctcccctttgagaatgccgtcccgcttcacgtagttaccgcccagcgtgctgttcaccacgacctcctcgagttccaccccctcgttcgacagacgaaaatcgacccgctccacgccgctctcgacacggatcgtatcgctggtatatccgacgaagccggcgaccagcatatcgtatcccttaacccggtgtatggtataatttccttcggcatcggcaccggttcccaccgtcgttccggcccaatacaccgatgcaccgaccagcggctcgtccgtgtcggctccatacacgacacctttgacattctgggcccgagccgcgccgaatgccgatgcaacaaaaaagactaatactgctaaatacttgaatttcatttgattttccgttgattgtgtaaacatgatgcaaaaataatattccattcttgcaatccggttgcaaatcgggcaaccggtctgtcgcagggaaaacacagtgcacgccgacactgcactttttcatgcgtcgttacacgaaaacgggaggagcacgcagtccggaagagagaagatggaccgtgctatgggccagacagagacgttcagaaaccgtcgcccaatgaacggaatcgaacggaatcgccgtcatctccgctgccaatatggcaggaagatcgacgatcatgaccttcgtatctcgctcccattgggacgacgatacggaagtatatagctccgatgccttggagtgatccaccccgcagcaaacggccttaaaactgaccgaatgagaatcgcattcggtatggatgtcgcaaccccggcagcatatatgcacctcgcccctctcccgctccaaacagtggcacgaaagtacggcgtatgccgctgcccccaccgagaaacagtaggcaaccagcaacatccacacggacatatatctgcgcagctttacgctcattcttcgactaaattacatgttttaagccgggcgacccacgcctgggcgtcgcgcgcggcggtttccgcatccacgtcgtactcgccgaggagcaaatcgcggacatcgtcgataccgaactcacgtccctgcaaccggttccacaaccagagcgaggtttcgttcaatgcaatcactttggtcatatccactccgtaacggccctgcattaccacgatgtgctcgcctgccatttcacggaccttatattcctctttgattctcatcggtcggttttcttcttcaacgtgcaaatataggaaaatatttcgagaaacctaatatgacgcactttttatcccttccgggctcgggtaaaagccaaaaacactacctttgtgtatatggaatcgacggcaccgaacagacggcaacagatcgcagcgctgctcaagcgctactgggggttcgacacgttccgccccgtgcaggaacaggtcatcctctcggtgctcgccggacgcgatacgctggccctgatgccgacgggcggcggcaagtcgctcacctatcagattccgggactggcttcggagggcgtatgcatcgtggtcaccccgctgatcgccctgatgaaagaccaggtcgatcggctccgcaagctgggcatccgcgctctggcgatccattcgggcctatcggcccgacagatcgacatcgacctggacaactgcgtctatggcgacgtgaaattcctctacgtcgctcccgaacggctcgcatccgaggccttccgcctgcgggtgcagcgaatgaacgtatcgcttctcgccgtcgatgaggcccactgcatctcccaatggggctacgacttccgcccctcctacctgcggatcgccgagctgcgcgagcggattcccggcgtccccgtgctggctctcacggcctcggccacaccgcgcgtcgcggacgacatcatggaaaagctgcacttcacggaaccccatctgctgcgcagcgatttttcgcgtcccaacctctcttatgccgtgcgccataccgacgacaaaaacgaacagctcctgcggatcatccgcaacgtcggcggttccggcatcgtctatgtccgcacccgcgaaggagccgaacaggtcgcggctttcctgcgcgacgaaggtatttccgcagaatattatcacggcggactgggacacgccgagcgctcgatgcggcaggatgcctggatttcggggcgcacccccgtcatggtagctaccaacgccttcgggatggggatcgacaagccggacgtccgctacgtggtacattatacgatgtgcgactcactcgaaagctactatcaggaggccggacgtgccggacgcgacgggcgacgcagctatgccgtattgctgatttcttccgacgatgcgggacgcatcgccaaacgcttcgaagcggactaccctccgctcgaaaagatccgttcgatctacgaaaaaatctgcagctacctccagatcgccatcggcgacggtgcccaaagttcctttctattcaacctgcgcgatttctgcacccgggagcacctctatacgggtctggtacagaacgccctgaagatcctgagtcagaacggctacatgaccctcctggacgaagcggccaaccccgcgcgcatcctcttctgcgtcagccgcgacgatctctaccgcctgcgggtgatccgcgacgatctggaccacatcatccgtgttctgctgcgtctgtacgaaggggttttcaccgacttccgccccatcgacgaaacggaaatagcgacctggagcggctatacgcccgaaaaggtgcacgacctgctgaaacggctctggcaactgcgcgtgatccgctacatcccctcgaaccgctcgccgctcctctacatggacgaagaacggctccccaccgccgatctctacatctcccccgaatcgtaccagcagcgccggaaacagacccgcgaacgattcgagcggatgctcgcctatgccacggcggaaaccggctgccgcagctccttcctggaagcctatttcggagtgccggagccccgggagtgcggcatctgcgacctctgcctcgcccgcaaacgcgccgcccgcgctccgcaggcggaagcctcgaaaaagaccgttctggagctgctccgcaacgacgctctcgatccccgggaaatcgtcgctgcactccgatccgatccggcacaaatcgccgagctcctgcgcaaattgagcggcgaaggcaaaatttccatactcccggatggaaaagtcacgattaatcggtaactttgcgcgatttcatgaacaaaccgatcacatttcaaaatagcatcagcaacgaggaggccgctctgcttccggccatcgaattccggggcccgatcgtcgtcgtggactcggaaccgaggctcagggaggcctgccgctacctggcggcacagcccgtcatcgggttcgacaccgaaacccggccttcgttccgggcgggcgtcgtcaatcgggtcgcactgctgcaactctcctcgccggaacagagcttcctgttccggctctgcaagattcctctcgacaaagccatcgtcaaaatcctcgaaaacaaggagatcctgaaaatcggcgccgatgtaaagggcgacctgcgggcactgcacaacatccggcactttcaggaagcgggcttcgtggatcttcaggagctcgccggagagtggggcatcgaagagaaaagcctgcgcaaactttcggcgatcgtactcggccagcgggtatccaaagctcagcgcctgagcaactgggaagccgcacaactcaccgacaagcagcagctctacgccgcaacggacgcctgggtctgcacgcgtatctacgaccggctgctgcacacacccaaaccaaagaaaacgaagaaatgatcccgcaaatacacctccgacgcggcaaggaagagtcgttgctgcgccgccatccctggattttctcgggcgcgatcgaatccgtccgttacgacggaaacgaaatccccgaaggtgccctcgtcgatgtctatacccgttcgggcgacttcatcgcccggggacattaccagatcggttcgatcgccgtgcgggtgctcaccttcgaacaggaaccgatcgacgcggcctggtggcagcggatgatctccaccgcactcgacgtgcgccgcacgctcgggctcacggatgcccccgacaccacctgctaccgtctggttcacggcgagggggactccctgccgggactcgtcgtcgatatttacgacacgaccgccgtgattcaatgtcactcggtgggcatgtaccacgcccgcctgacaatcgccgatgcgatccgaacggtttacggcgaccggatcaccgccatctacgacaaaagttcccaaaccgtaccgttcaaggccggcctgaatcccgtggacgggtacctttacggcaaaacgggaggaatgccccgcaccgtgctcgaaaacggcgaaaaattcctggtcaactgggaagagggccagaagacgggcttctttatcgaccagcgcttcaaccgcgaactggtacgccgctacgcccgaggacgcacggtcctcaataccttctgctacacgggcggattttcggtatatgctcttgcgggcggagcacgcgaagtatgctcgatcgactcctcggagcgggccgtcgccctggccgacgccaacgttcggctcaacttcggagaagaggctccccacacttcgctggccgtcgatgccgtcgaatacctcaaggacatcggcgaccggtacgacatgatcatcctcgacccgccggccttcgccaagcaccacaaagtgctgggcaatgccatgcagggctacaagcggctcaatgcccgggcgctggcgcagatcaaaagcggagggctcctcttcactttctcctgttcgcaggcggtcagcaaggagttgttccgcaccacggtcttctcggccgcagccatcgccggacgcaaggtccgcatcctgcaccaactgacccagcccgccgaccatccgatcaacatctatcatcccgaaggcgaatacctcaagggattggtactttacgtcgaataaatccgctctcgaaccgaatccaaatagtcgatatggaacgcgaaacgatcgtccgggaatttctcgacagacacaaaatccggtacgacatctatcaccacccggcttccccgaccatcgaagaggccaaggcacattggcgcgaggacgggtcgaaacattgcaaaaacctcttcttccgcaaccacaagggcgaccgtcattatttggtctgtttcgactgcgaccgctcgctggcgattcacgatctggaacaccgactgcggcagggcaaactcaccttcgcctcgccgcagcgcatggaacgctacctagggctcgaaccgggttccgtgtcgccgttcggccttatcaacgatgcggaacaccacgtacatctctttttagaccgtcatctgcaaacgtgcgacagtttgagtttccaccccaacgattgccgagccacggtggtcatttcccgccccgaattcgaacgctacctctccctggtcggaaatacgtacgaatacctcgacctctacgactgacacgcctgaaatccacagcgccgtgcgaatgaaggggctctctaacagtccgaataagttatcacccctgtcaggatgaactctgacaggggtgattttcaatttcgaaaacttgttagggaactcttcgcacctttcggttatttccgtcgggaagcgttcctttgcgcctcctcctgctgacgcagcaactcttcgtaacgcaactggaacttggatttcttcctgttcttgtttttcgcggcattggcctgcatcacggcatgaattttctcgtcgtcgatcatccggcggatcacgagcgtctgtccgatcgtgagaatgttggccaggaagtagtagtaagtcagaccgctcgaataactgttgaaccacaggagcatcatcaccggcatcagataaaccatcataaacttcatgccggccatctggggctgcgacgaagccgtctgctggtaattgatatacgagaaggcgaacagcgcaacggtcatcaacagggcgaacaggctcacgtgatctccgtagaagggaatgttgaacggcagcgacaacacgctgtcgtacgacgaaaggtcgtcggcccaaaggaaatgctggccgcgcagctcgatcgaagcggggaagaagcggaacatcgcaatgatgatcggcatctggatcaacagcgggatacaaccgcccatcgggttgataccggccttcttgtagagctccatcgtcgcctgctggcgcttcatggcatcctcctggcgcggatatttcttggccagctcatcaacctcgggcttgatgacgcgcatcttggccgtcgatatgtaactcttataggtcagcggcgagatgatgaccttcaccagcacggccaagatcaggataatcaggccgaaactcgggataaactgacgcaggaaatcgaacaccggaatcacgaaccagcggttcacccagccgaaaataccccagccgagcggaatcaaccgctccagatgcagttcgtcgtccccctcggtcgtcgccacatgcttgagaatggcgtatttgttcggaccgaaatagaaggcgaagttgtaatggtcagtttgcgccgtatagggaaccgtcaatttagccgaaaaatcctttatgtaacccgaacctttttccgccgtcgtaaacttcatatcagcgtaggagaagttctccggggcgatcatcaccgacgagaagaactgctgcttgaaagccacccagttgagcgacgacgaaaccgtcttctgcttctccccgtcgcttatccccaggtcgtcggccgacgactcgccgggagcccggtaatagatggtcgtataggtattctcgttctgaaaccctttctcattctgataggaccggttgctccagtcgatgccgatagtcgtctggctggccatctgcggcgccatatttttcagatagacattcagatcgaccagataatcccgcgccggcgactgtatgttataaacgacatactcgtaccgtaacacggcgtcacgcgccaccggcagatccatcgtgatgcgctgcgcaccgtcggcatccttctccatcgacaccagattgaaggtgtaatccgccgtattgaccaacacgttgttatgaccattcttcacatagaacgtcagggcgaaattggccgttgccggatcgaaaagccgcaccggctgattccgctcgtcacgaggtgcatacttggtgtaatccttcagcgtaacatccttgacctggccgccacgcgtcgagaaatcgatcttcaatacctcgttctccacggtgaactcctcggcttcggcctgctgcgccgcagccagcagctctccgaactgcatgatccgacgctgcgcctgcaggctgtccccggacaaccgctctcccgcagccgcaatagctgcggaatccgcagtcggcagcggagcgttgagcgccaagagcgaatcctgctcggcttggatacgcgcctgttcggcgttgtacgccatgagctgttcctgatactttttctgttgatgcgaattatagaacgtgaaacccaggaagatcagggccacgatgacaattccggcgattgattttttatccatgcgtaatctaaattctttgaggataccccgaagcaaggttgcaaactattttttcttatcgtcttttcccgccagcgccgcagctacgaacgcgacgaaaagcggatgaggccgctgtacggtgctcttgtattcgggatggtattgcgtaccgacgaaccagggatggtcgggaatttcgaccacttcgaccagccccgtatcggggttcgcaccgacggctttcattccgtggctctcgaaatccttcaggtattcgctgttgaattcgtagcggtggcgatgacgctcctgaatctgagtcgtaccgtaagcctgcgcagctttcgatcccggcaccagcgagcaggggtaagctcccagacgcatcgtgccgcctttggcggtaatgcccttctgttcctccatcaggtcgatgaccggatgcttcgtcgccgggtccatttctgtcgaggtggcatccttgaagcccagtacgttgcgagcgaattcgatcacggcgcactgcatacccagacagattcccaggaacggaatacggtgagtccgcgcaaagtgcaccgcttcgatcttcccctcgattccccggttgccgaaccccggagccacgagaataccggccattttgccgagcttctccccgacgttcgaagcgtctatcttctccgaattcacgtaatgcaacttcaccttgcagtcgttcaccgcaccggcttgaataaaggactcgcagatcgacttgtaagcatcgggaagttccgtatatttacccaccagggcgatgtcgatcgtccgcttgggattcttcaccttatcgacgaaagcctgcaacgaactcaagtcgggttcctgctccgacggaaggtcgagcttgctgagcaccacctcgtccagatgctgacggtgcatcaccagcggcacttcgtagatcgtcggtacgtcgatcgactccatcaccgcgttggcatccacgttgcagaagagcgccaccttgcgcctgagctccgcagagagcggatgctcggtgcgcagcaccagaatatcgggctgcaaaccgttctcgagcaaggtcttgaccgaatgttgggtcggcttggtcttcaactcgccggaagcggccaggtaaggaatgagcgtcagatgaaccagcgccgtattgcgggctccaagctggtaacgcaactgacgcaccgattcgatgaagggcagcgactcgatgtcgcccaccgtaccgccgatctcggtgatgattacgtcgtactccttgcgctgcgccaacagttgaatgcggcgcttgatttcgtccgtgatatgaggaatgacctgcacggtcttgcccaggtactcgcccttgcgctccttgtcaatcacgcactgataaatcttaccggtggtcacgttgttggcatggctggtcgtaatcgaagtgaaacgctcgtaatggcccaggtcgaggtcggtttccgcaccgtcttcggtcacgtaacactctccgtgctcgtaaggattcagggttccggggtcgatattgatatagggatccagtttctgaatcgtcaccgaatagccgcgtgcctgcagcaagcgggcgatcgacgccgaaataatgcctttaccgagcgacgaagccacgccgcccgtcacgaaaatgtacttgggtttgctgagtttcattatctgtttcgaattattttgtttgcaccgtcgtttatccggctccgtttcaacccttaagccggaacgcccggttctccacttgcctattaaaacatcgttccggaaccgctttcgaagaccgctccggaaaccttcccgctccgagggccggactcacataaaatacaccgctatccccacaaagaagtttcctcaccggaaagggatgtgtcaaattgagaaattcggcgcatcccctttcacatgtataagaacaggtaaaaataccaagcatcgaggttcacggcgaagaacgtgtacccgacgtacatgatcgagccgtaataccgataataacgaagtaatttgcctgttatgacacaccgtcttcggcgggttattccttattctcctcctgatcgatgagtttcactttttcgatagcggcctgcatttcctgtttggcccgctcgatcttggcccgcacctcggcgatcatcgcctcggcgttcttcgacttggagaagaatccgatgttgttctccaacaaggcgatatcctgctccaactggcggactttgttgtagagccggtcgcgctccgtgcgcagacgccggtcgcccgaggccttgagcgaggagaccttctccttgaaacggtccatcgaacggtcgcgctccgaaccgcgcagggtatcgaacatcttatcgaccacctccttgtaacgtttttgaatcgcctccttctgcttgatgggcacgaacccgatttcgccccagcgacgctggaaatcacgaatcatctcgaagccgcccgccagaatatcggccgcagccatctcctccaacagagcctctttgcgacggaggttctccccgtactgatcgtccactgcagcgaaatgtcgggacttgcgctcgaagaaagcgtcgcacgccgcacggaaccgtttccatatctggtcggaatagcggcgcgacacggcccccgtctgcttccacttggcctgcaaagcgatcagctcgtcggtcgtcttcttccactcctcgctgtcgcgcagcgcttcggccgcctcgcacaactcggtcttgagctggaggttgtgctccatctcgcccttcaacccggcatagtaggcacgcttggcctcgaagaatttgtcgcaggcattgcggaaacgctcgtagatggcattgttatctttcttgggagcgaatccgatcgttttccagactttctgtatctcgaagagcttctcgctcgccttgttccactctttgcgcgaagtcagcggctgctgcgccaactcttcggccttgacacaaagctcgctcttgagttccagattgcggagctgctcctgcttgatattctcgaaaaactcctgatgctgcttgttgatacggctcgaagcctccttgaaacgattccacagcacctctttatattcattggccacagggccgatttctcgccactcgtcgtgcagcttctgcagtttgtggaacgcctcgacgatcgacggttcgagcaccagcgcttcggcctgttcgcacagagccagcttctgctcgtaattcttcttcaggtcgagatcgcgcaactccttgttgatcttgatgaaattgtagaaattctccacgtgcaggttgtaggtttcccacagatccttcacattctgctggggcaccaccccggtctctttccaacgatgctgcaattcccggaacttgttgaaagtctggttgagcatctcgtccgacgaggccagctccttgagttcctcgatgatctgcaactttatcttgaggttctcctccttggccgcttcgagtccggcgacgaactcgtcccgcaaacgacggtactcccggaaaagatctttgaaacgcaactccgccggatccggctcggaaacgaattcaccctccgcaccgccggcttcgacgaaagcccgtcgcgcagcatcggactccgcccgacgcaatttgtaaaacgctatcttgagggcctccacatcccggcgcagggactgcaccggccgctcttcgagcatcctggcgaaaatcgccagcaactcctccttcgacttgcccgccaggtcgctgccggccgcgtccccgcctgcggcctcctcctcgggcgaagcctcgcccaggtcgagtcctgcattttcggcagccagcgctgcatcttcgtcggcgaagtccacccgactctgcgtcggcacgtcggtatcgtccgcaactgcggcattcgtttccccgccatctgcgggcacggaattgttctgcgtatcctcaactacggaagagtcgagatgttccccggaaacaggaagagtagaattttcagtagccatcttgtctgattttaatcttacggtttgcaaaaccatataaaccttgcaaatataaccatttttccggcccccgcacaggatttgccgataaatttattatcttcgcaaaaattacgcacgctcttatgagtcatcgcatcctgctcgtcgacgacgaagacgacatcctcgaattcatccgttacaacctgaccaaggcgggctacgaagtatatacggcccgcaacggagccgaaggtttgcaacaggctgcggcgcatcggccgcacctgatcctgctcgacgtgatgatgcccacgatggacggcatcgaaacctgccgggccctgcgctgcgacccggcgctgaaggagacgatggtcgtctttctctcggccctcggcgaagaggagcaacagctcgcagggttcggagccggagccgacgactatatttccaagccgatcaagcccaaacttctgataagccgcatccaggcgatcctcaaacgggtagccgccgacaaaccggcttcgctggtcatcgaccgggaacgacatctggtaatccgcaacggagaacgtatcgaactgcctcgcaaggagttcgccctgctcgccctgctcgcctcctctcccggaaaactcttttcccgggaagagatctactcccgtatctggggcgacggcgtggtcgtcggcgaccgcacgatcgacgtccacgtccgcaaaatccgacaaaaaatcggagacggacacatctcgaccgtaaagggtatggggtacaaatacgaaaattaaccacagatagtccaaaatttatcacaaaaattccggaaaaccttacgatccgtaattaaattttgcgtaaatttgcaaagtcttaagtaaaaacgcattttcgacgaaatgatccgcgagatcgtggcagtaggaatcggaggagccctgggcagtatgtcaaggtacttggtatcctacgtatggctggccgaacagtccctgttgggcttcccggccggcactttcacggtcaatgccgccggatcgttgctgatgggctttttgctggagatgctgggcgcaggaactgcgtcgtggctgttgagcgtaggattctgcggaggattcactaccttttccactttttcttccgacgtggtgcggatgcttaaaagcggcgactacacggcagccggactttgcatcgcgctcaattttgcggcatgcgtgtgctgcatcctgttgggcgccgcattgggacggttgctgaaacgctgacaacgaacaaggaaacaacaaaataatttttacaaaacaactgaaatggtcattttagtactcaactgcggcagttcttcgatcaaataccaggtgatcgacatggaagcccagtccagcaaactgctcgccaaaggtctggtcgagcgcatcggccttcctgaaggcgatctcacgcacaaacccgtcggcaaggagaagttcgaactccaccagccgattcccgaccacacgacgggcatcagcctggtgcttcaggccctgaccgaccccgtgcacggcgtaatccggtcgctcgacgaagtgaaggccgtcggtcaccgcgtagcgcacggcggagaatttttcccggagagctgtctggtaaccaaacaggtccaggagaagatccgctcactgttccagatcgctccgctgcacaatccggctaacttggaaggtattctttccatcgaaaaagtccttcccggcgtgaaacaggtagccgtattcgacacctcgttccaccagacgcttcccgcaaccaacttcatgtacgccctgccctacgagtactaccagaaatacggcatccgtaaatacggcttccacggcacgagccacaagttcgtcgcccgcgaaggcgccaaactcgccggtctggatatcaataactccaagatcattacctgtcatatcggcaacggcggttcgattacggccgtgctgaacggcaagtcctacgatacctcgatgggcttctcgccggtcgatggtctggtcatgggcacccgctgcggcaatgtcgatccgagcgcggtcaccttcatcggcgaaaaggagcaaatgagctatgccgaagtgaacaacatgctcaacaagcaatcgggcgtcttcggcgtatcgggcgtatcgagcgacatgcgcgacatcgacaaagcctatgaagagggtaatccgcgtgcgatcctcgcccgcgacatgtactgcctgcgcatcaagaaattcgtcggtgaatacgcagccgaaatgggcggcgtcgatctgatcgttttcacgggcggcgtcggcgagaactcgcccgaaacccgcaaggaggtctgcgaaggcctcgaattcatgggcgtgcacttcgaccggaagatcaacgaaggtcttcgcggcgaaaacaagatcatctccgcagcggattcgaaggtcaaggtggccgtcgttccgaccaacgaggagctggtcatcgccaccgacacttacgaaatcgtcaataaataaccaaacaattatattaaaaacacacaacccatgcaacatttgagtgaaattgtcgaagaggcaagaaaaaaaggtaagaagcgccttgcagtcgcttacggtcaggacgcccacacgctggcagccgtctatgcagcttataaggaaggtctggtagagccgattctgttcggcgatcccaagatcatcgagcaggtttgcaaggaagagaatatcgattgcaacattttcaaaataatccccgagagcaacgacgtgaagtgcgtcaatctggctgtcaatgccgtcgttacgggcgaggccgacgtactgatgaagggtctggtttccacggacaagtacatgcgcggcatcctgaacaaggacgcaggtctgttccccccgaaaggcacgttgagccacgtagcggtagtcgaaatgccgaactatcccaagttgctggtcatctcggacgtagcggtgattccgcagcccgacttcaaacagaaaaccatcctgatcggctacctgacgcgcatcgccaacctgatcggtatcaagacgccgaagatcgcctgcatcgcaccttcggagcagctgttgccgagcgtgctctcctcgaccgaagccgctctgctcgccaagatgggcgatcgcggacagctgggtaacgtcgtcatcgacggtccgctgtcgctcgacgtagcgctttacaaggaagccgccgagatcaagaaggtcaagggttcttccgtcgcaggcgatgcggactgcctgctcttccccaacatcgaatcgggcaacgtcttcttcaaggcttccacgcacatgggcggcggcgagatcgcagcgatggtcatgggaaccaaagttccctgcgtgctgacttcgcgcggcgactccagcctcaccaaactctactcgatcgcactggcttgtctggccgctaaataattcaggtatcggatttatgggattcaagattttagcaatcaacccgggctcgacttcgacgaagatcgccctgtatgacgacgagcagcctacgctggcgctcaccctgcgccattcggccgaggagatcgcacgtttcccgcgcatcatcgaccagctcgactggcgcaaggagatggtactcgaagcactcgcaaagaacaacttcgacgtgaagtccctctcggccgtgatcggtcgcggcggtctgatcaagccgatcgaatcgggcgtatatgaagtaaacgcagctctgaagaacgacctggtgaacgcccagcgcgaacacgcctccaatctcggcggcctgatcgccgagcagatcgcccaggctgccggcgtgaaggcttacatcgccgacccggtcgtggtcgatgagctggacgacatcgcccgcctgagcggtattccggaatgcccccgcatttcgatcttccacgccctgaaccagaaagccatcgcacgccgccatgccgaaaaggtaggcaagcgttacgaagacctgaacctggtcgttgcccacatgggcggcggcatttcggtctcggcccactgcaagggacgggtgatcgacaccaacaacgccctcgacggcgacggcccgatcgcacccgaacgtgcaggcacggtgcctgccggagcgctcgtgaacctctgcttttcgggcaagtacagccagcgcgacgtgctgaagatgctcgccggcaaaggcggtctggtggctcacctgaaccagaactccgtgcagcagatctgcatcgacatcgaaaagggcaaccagaaatccaaagccgtgctcgacgcgatgagttacagcatcgccaaggagatcggcgcgatggctgcggttctcaaaggtcaggtggatgccatcctgctcacgggcggcgtggcgtacaacgaaccggtgaacgacgtaatccgcgaacactgttcgttcctcgccccgatcttcatctatccgggcgaagacgaaatgggagcattgatgctcaatgccttgagcgtactgcgcggcgaaagaaccccgaaggtttacgcataatagatcggatctgcgttctccgtttccggtacccggcgacacccgaacaaattcggcatggtttcgcatcgatcgaaaacggttaaaccggatataaaaaagctcttcctttaccggaagagcttttttactaattcccacgcgacccgcatcgcttcgagccggaacaacgctccgaacccagcgtaacagaccacgccgaccgccactttcaataggaacgtaggcaaaggtgcgaagctggtgaagtgtccgaaggcccaaaccacaccgaacatcgccgccgtcgcagaagctataggcagcaacgtccgcaaaaaacgacctgccgtcagccccgcataccgggtcgtcgcgccaaaattgaggatcatttcgaaaaaagccatcgccgacaggccccacgtcacggcgagcacgctgtgcgggatcgtcaggatcaggaccagggtcatcactaccttcttgaccacttccagccgcacgatgatccgaccgttgctcttcaccttcagcacattattcgaaaccgtagcgatcggagcgaacattccggccagcgaaacgacctgaaaatagggaaccatcggcatccacttctccccgagcagactgtccaccatttcaggagcgacgacaatcagaccggccatcatcggcagcatcacgaaagcgacgatcattactacctgccggtagctctcggcgaatttacgctcgtcgtccgcgatcttggaaagtgcgggaaaagtcacgctctgcacggcctgcatggtcgatgtcacgggcagctccttgagtttctgcgcctggttgaaaaagcccagcacatccgcagcatagagcttcccgacgaaaagctgggaaacattgttgtaaacggaagaaatcagatcggtcgccagcaaccggaagctatacggagccatcgcacgcagacaccccgcgtcgaaagccgcccgagggcgccagtcgctcaacccccacagcaacatggcccgtacacccatcgccactacccgttgccccaccaggctccagataccgcatccggcccaagccataccgatagccaccagtccgcttacgagcgacgaagtaaaaacgaccttcgaaagccgggcgaaacggaactgccgggtgaaaatcgtattctgaatcacgcacagggcattgagaggcacaagcaggaacaacaccggagcgatccgcaccaactcgggcattccgtaaaaacgggcgatccagggcatcgcccccaccaacagcaggtacagcagcaccgaaaccgcgatattgaagacgaataccgacttgtagtcctcttccgacggcaccgcttttcggatcagggtctgcgaaaaaccgctgtccaccatcaccagcgccagggacgaaaaaaccacaggaatggccataatacccatctgctcgggcgtcagcaaccggaggatgacgatactcacccccatttgcagcaacatggagcctaccttttcggcaatactccacgctacaccgcttgcgaccttgtcccgcaattcacctcccacgacccttcggatttagcagccgtcgcacacggcatcccgctcgcggaaccgttcggcgctcgaaatctcgaggtacgaagcgccgtatttcgaatcgaagctgccgcccaccacagccagcagatcggtcggttcgatcgcatgcttgcgctggataaaatccagggcgtcgatcacgaagtggtaacgatcctgatagcgttcgtgcgactgctgttcacgcaggatcggcacgacgccgtacgaaagagccagaatacgctgcgcatgacgggtataacaaaccgccaagacctgacaccggccccggaaagcggccagataacggcccgtgcgtccggtcgcggtatcgagcaccacatagcgaatcggcaagttcgtactggcccgcaccgccgaacgcgccaactgcgccgtgatctcgtggttcacggaaaccatgttcatatcgatcatcggcgtaaaatgcgtttcgtccttctcgatctcgcgggccacgcgcgacatcgtactcacggcctccaccggatagtcgcccatagccgtttcgtcgctcaacatcacggcatccacgcgctcgtaaatggcactggccacgtcgctcacctcggcccgagtcggacggggcgagcgcaccatcgaatagagcatctgcgtagcgatgatcaccggtcgtttggcggctatgcaacgctccacgatacgccgctgcgcgttgggaatcgcctcggccggaagttcgacccccagatcgccccgggcgaccatcaccccgtacgaagcctcgacgatttcgtccaggttgtcgatcccctgctggttctcgatcttggagatgatcttgatcggactgtcgtaacggtcgagaatctcctgcacggcatgcacgtccccggcgctccgcacgaaggagtgagcgatgaaatcgacgtcgttcttcacggcccattcgatgaagcggcggtctttttccgtcaccgacggcaggtcgatcttcatccccggcacattgacgctcttgcgcgaccgcagcgtgccgccccgcacgaactcgcacatcagctcctcgtcggtcttgtccgtcacgcggagttccaactccccgtcggcaatcaacaaccgcgcaccgaccgcgatatcgcgtaccaccgtcgccacgttgaagtagatcgtatcgcgggtcgaaggttcgccatcggccgtcccgcgcaccttcacgcgctccccggtctgaaagccgatcgcaccgccgtactcgtcggccacggccgtcacacggatttcaggtcctttggtatccagaatgaccggaatcgccggattgacccggcgcaccgcctcgacgatcttcgcggccccctcttcggtcacatgcgccgaattgatgcgtactacgtccattccggcctcgaaaaggccgcgtacaaattcttcgttggcgcggaaatccgacaacgtggctacgatcttggttttcttctctccccacatacagcttcttgttaaattatatcgtttcaaatcaaaattacacctggaatccggaatccgcctctatccgaagcttttccgccattcgatcgcgcaccaatcctttacgcacgagcacccgacagacagaactcgcatcgttccgaatatcttccgtcgtaatccgaaaacggacacttcgacgagccgaaaatcccgaaaacatccacagcacaggcagcgctccgactatccccagccagacaaacggcacgaagggcacgccttcgtcattcctgcttacaaaaatagtgaaaaacccggatatacgccgcaagatcctccgattcgcatcgaattcacacacatttcacacccgtccgaaagtcgggacgacccgggcgccgaaaataaattttcgtatcctcccggctttggctatctttgcagaagacaggatgcggttcggcaattttcaagaacaagttctcataattgctctcggctttcgctatctttgtagaagataagacgcgcctcggcaaaatacaaataaaatttgcttttgcgctcggcttattcgtatctttgctacattccggacttcggccgcgtccgttcaatttacccgaacgccgccgctccgcacaaaccgccattcgacatgactgaattcggacttatcgacacgatccgcgacatgttcgccgcaattccccgcaacggattcgacggcatcggggacgactgcacggtcttcccgctgggcagcggcgaatcgctggtcttcaccgccgacctgctggccgaaaacatccacttcctgcgccgggcgacctcggcgcgtgaattgggccgtaaatccctggccgtcaatctgagcgatgtcgcggcgatgggcgcccgcccgatcgcaaccctgctctcgctggctatcccgcacgacctgcccgaaggatggatcgaagatttcatggaaggctaccgcgacctctcggcccaatacgacgtcggcctggtcgggggcgacaccacagcctcggattcgggactggtcgtcaatgtaacggccatcgggcgtatcgccgacagccatatcaaacggcgcagcgacgcacgccccggcgacttgatcgccgtcggcggttcgctgggagagtcgggcgccggactgcgcgatatcctggccggacggtacgacaccccgctggcacagatccaccgcaaccccgccccgcaagtcgccgaaggcatctggctcggcgaacgtccggaagtgcacgccatgatggacatctcggacggcatcgcctccgacctgcggcatatcctgcaccagtccggcgtaggtgccgaagtcgataccgagtgcatcccgactcccgtcgatctcgaaaccgccgtatccggcggcgaagactacaaacttctcttcaccgtcgctccggagagcgccaacacacttctgtccaactaccggctccgtttcggcgatgagttccacttcatcggccgcatcacgggcggcaatcatctcgaatggctccgaaacggcacccctctgccggtcgattggcagggattccgccactattgaccggcgttccgaaaaggttgcaacaacccggcacataccgtcctccgaaatatccgaaggtcatcctccataccgctcctcataccttctgcttctccgcagaaaggagccgttgcaaatccggtccgcatcgcccgccgcaatattcccgctgcaagcgctcgaaatcccggcgattcaccgcaagctctctccaaaacgaagccgacttctgccgtacgacatcggcacggtccgccgcaaaaaataaaggggctgtgtcgaaatgaaaatttcagacacaacctctaagggatgtcagaatggatgcaaggcattgagggtaagggcgacaggaatttactgccgtaaagatttagcccgcatcccgataatgacgcagcagtgcgctttataacacatcgccgtatctccaaaaactctatccacacgcatcgaaagccgcttcattccacgatatagactttctccccccgccgctgcatgcgatagcgctcgcgggcgaattgctccagattatcgtcgtacttgagctcttcgagcagcgtactgtcctgctcgatccgagcgcgatagatcgccctttcctgctccaggatagcgatatcttttctgatctctatggcgtgcagcagatttcgtcccacgatgaaaatcgtgaaaaccacgatgatacaagtaatcaccacccaaaaccgcttgtccaatttcaactgcatcttccgaatcctttaaggaatatgcatgtatttatgcgtctggatcgaaatattccacgcaggatgcgccttgacgtactcgaccagcaggggcatgatctcctccgacacgctccattcgggctgcaggaagagcttgcactcccgtccgacctgttcggcgttccgctcggcccattgcaaatcggcctcccgctcgacgatgaccttcagctcgtgcgcccgccagaacgcctccggcagaggcggctgctgacgcttgggcgaaaggcaaacccagtcgaaatacccgctgaaagggtgcgaccccgaagtttcgagaaatatcttgagtccgtgccccttgagcgccgaagtcaaaggccccaacgggtaaagcaacggctctccgcccgtgatgacgatagcctgcgcctggcacgaagtcgctcgccgcaccacctccgaaatatcggtcggaggatagagtttcggattccacgtatatttggcatcgcaccagcggcagcctacgtcgcatccgcccaggcggatgaaataggccggtttgcccgtatggaatccttcgccttgaatcgtatagaaatcctccaccagaggcaatttccgccctccgtccaacaagtcgtaattcgtcgcttccttcatcggactattcggtcaccacgtaaacatccttgtaattccggcccaactggtcgtagtccagcccgtatcccacgataaactcgttgccgatgtgcatggccggataatcgatcggaatctggcgctggtatgctttcggtttgaagaaaagcgtacacacgcggatactggcgggcttcttcgtcttcaactcctcgaccatgtgttcgatgctggcgcccgtatccacaatgtcctcgacgataatcacgtcccggccttcgatgttgttgcccagtcctatcagacacttgacatcccccgacgaggaggtaccgcagtacgaagagagtttcacgaacgatatttcgcagttgaaatcgatcttcttcagcaggtcgctcatgaacataaacgagccgttgagcacccccagaaacagcggattccgtttctcccggtaatcctcgttgatcttcgccgctaccgcagccacggcttcttctatctttgcagccggaatcatcaccttgaattttttatcatgcaattttatgacgttttctttcatcgggatacggattttattgttatttttacaaaagtaaataatttgagccacaaagttacacaatccggaagaaaaattctatgcttgcaaaactcatccgcaggatcaaatgttgttccgtccaggaaatcctgatgatcgtatccatcatcatgctcttgatcgtgatcgccaaccgaacctcggcagggataaaagccagatcggcgtcttcgggacagattacacaacaccaaaaacaggctgccccaccgcaggagtaatcgatacgatcttttttcgcaaagttgttcctactggcgggaacagacaaaatttccgacatgactttcaacttctgcctcaacctttttttggctgaaaagccgagaaacgcaacatgcaaaaaatcaggagcaaaaaaacctatactcctgatttttaaagcctttattttacccatccccattcagcaagatgctaaatggaagtaaaatatatcctccgaagcactattccgattcctttaacttcgaaatcggcataaaccggttgtccaatggttccgacttatggattgtgcgcactccattaacgacagccacacagttgtccggcacatccgtaaaaattacggcattggcgccaatgcggacattattcccaacctttacccctccgattatcttcacaccggctccgatatatacattatctccgatgacgggggctcccggtctctgactatccggcaatgtattcgatccgatcgtcacctgttgaaaaatcacgcaattttcaccgataaccgccctctccgaaataaaaactccaaataaatcgtgaggaaaagtaattttggatttaatccggacatcaaatccaatgtatgccccatatagcagcaaattaacctgccacaaatatcatttcagtttagacggacggatttgacaagaacgatagaagtccccctccgataaaatagcctgataatcaacggggcaaatcccttaaatagaaataatagctctttcataaatcccttttcgtaccaataaccgttataccagcccggagaaacccatgaaggccattgccaaaataccggccgtaatcagcgccacgggaaccccctgcacggccttggggacatcctccagttcgagccgctcgcgaataccggcgaacagcaccagcgccaatgcgaagccgatggccgtcgccacggaataaacgatgctctgcaacaggttgaactccttggagatcatcagaatcgccacgcccagcacggcacagttcgtcgtaatgagcggcaggaaaattccaagcgcctgatagagcgacggagacaccttcttcaacatgatttccaccatctgcaccagagccgcgatcaccagaataaagacgatcgtctgcatgtattcgatccccagcggcaccaatacgtaagtctgaatagaccatgcaaccaccgaagtaagggccataacgaaggtcacggcagctcccataccgagcgaagtttcgactttcgacgacacgcccaggaacgggcagatgccgaggaattgagccagcacgacgttattgacgaagatcgcgccgatgataatggcaaaataagagagctccatacctatttcttgagaaatttattaaacaatgccatcagataccccagtacgataaaagcacccggagccagcacgaacaccaacggcatgtagtccgtaataccgaacgaataaccgaagatggccccgctgcccaacacttcgcggacggcccccaccaacgtcagggacagcgtgaagcccagaccaatcccgataccgtcgaagatcgaagccaccggtccgttcttcgaggcgaatgcctccgcacgtcccaggatgatgcagttcaccacgatcagcggaatgaatacgcccagactggcatacaacgccgggacatacgcctgcatcagcatagagataatggtcacgaacgatgcgatcaccacgataaaagccgggatgcgcaccttgtccggaatcaggttcttaatcaatgagatgaccaggttcgacagaatcagcacggccatcgtcgccacgcccataccgaaaccgttctccgccgaagtcgtcgtacccagcgtgggacacatgccgagtaccagaacgaacgtcggattattcttgataatgccgctcgcaagtactttcaaattattcatttcgacctccttcctgtgcattgttcacggtctgacttcctcgctggaggcggttggaacggccttcacgctccaatccccgctctcgataccgctcttcacccgcagctcgcgtcccggcctctgcattcggccgagcagccgtcgcgcccgtcgcggcttccgttcccgtttcttgattgttcgaagcaccggacgcaccatccgctcccgcatctcgggtagccgaagcccccgaagtaccgtccgcactcgcattttgagtattcgaagcacccgaaacggtattcacggcagcttcgacgcctgccttttcgcaataggccttataagcccgactcacggcatcgacataagcccgcgacgaaatcgtcgccgccgtcagggcatccacgtcgccgccgtccttcttcacgcccagtttcatttgggccggattccggccgacaaaactcttttccagcggattgcccgcaccgaccatcttggtacccagccccggagtttccgcctgttcgagcacccggatattgaggatctgaccatcaggggcaaaaccgaccatcagccggatcaccccactgaacccgtttttagtcatcgattctacggcataacccaccacacggcctccctcggaagccgtatggaccgtcaccggcaagttctcgacggtcaatgccgtatcctccgtttcgtcgaactcgggcagcacctgtttgagcgcctcgcgggtcgccttgacccgtgcctcggcaatcggctcctcggtaatcatatggaccgctcccacgcctgcggaagcgagcagtgtgatcacgaacagcaccataaccatattgaataatgtactcttcatcctccgctcctcctattttaacccgaaacgccggggtttgacatatttgttgatcaggggcacgaccgaattcatgatcaggatcgcaaatgacataccctcgggataggcgccccacaaacggatcagtaccgtaatgatgccgatgccgactccgtaaatcagcataccggtatgcgtcatcggcgaagtcgaatagtcggtagccatgtaaacggcacccagaatggctccgcctgcaagcagatggaacagcgggaactcccacaacgcttcaccgtgcataccctgtccgaggccgaccagaaagacgaacacggccatcgttcccaggaccgccaccggaatatgccacgtaatgacttttctccacagcagatagacggctcccaccagcaacagcagggccgagacctcacccagcgaaccggggatcgaaccgaaaaggacatcctgataattgaccgacgtatgcgacaccagctccgctttgacggctgccagcggcgtcgctcccgaaaaagcgtcggccaactgtccgaccggacggggaaaagtcgtcatctgcaccgggtaggcgaacaacaggaacacacgacccaccaacgccggattgaacggattcttgcccagccccccgaaagtcatcttggcaatggcgatcgacacgaaagcgccgatcacgacgatccaccagggcagcgacgccggcaggttgaaagccagcaggacgccggtcaccacggccgacaggtcgctcaccgtacaaggccccttaagcagaaatttctgaatcaggtattcgaacagcacgcaactggccaccgaaatacaggtcaccgccagggcgctccagccgaacgccaccaccgaaaacaccagcgcgggcgtcagcgccagcagaacgtcccgcatgatcttttgcgtcgattccgaaccatgcacgtgcggagcgggtgctacgatcaatttatttgccatacgctatctcttttttcttatttcttggttgcatgggcggcggcgcgggcacggatcaacgccccgacctcctgttttcccattcggataaagtccagcagcggaatatccgccggacaggtaaactgacagcagccgcactcgatgcagttggtcacccactccgcctcgagccgctcccacagcttgcggcgcgagagtttggccatcagataaggctccaatcccatcgggcaagccgacacgcatttggcgcatttgatacaggagctctcccgaccacgcagggctgccgcacccccgagcaccgtaatacccgaacagcctttgaccaccggtgaggcgaggttgctcatcgcccgtcccatcatcggcccgccgttgagcactttcacatccccggccggcacgcctcccgcagcctccaacaagacagccaccggcgttccgaaacggacgagcagatttttcggagcctccacctggcgacccgtaacagtcaccacccgctcgatcagaggtttgttcttctgcaccgcatcgtacacggccaccgtcgtcgaaacattgcagacgacggcacccacgtcgatcggtaatcccggcggcggcggaacctcccgacccgtaacggccgctatcaactgtttttcgcccccctgcggataacggacccgaagcggaacgacccggattccggggtacgacgaagccagccgactcaatcgggtgatcgcatccggtttgttgttctcgattccgaccgaagcgccgctcacgccgagcgcccgcatcaggatcgtgacgcccacgagcagctcttcactccgttcgagcatcacccgatggtcggacgtcaggtaaggttcgcactcgacaccattaataatcaagtgctcgacctttttcccggcaggcaccgtcagtttgacctgcgtggggaacgccgcaccgcccataccgacgatacccgcctccttgatcctggcaagaatctccggagccgaaagcgtacattcgcgcacgagctccttcgaagtgtcgatcccttcggcccattcatccccctcgcgacggatcgtaatcatcatctggcggattccctgcccgttgggcagcatatccacccccgtcacggtgcccgacacgggcgcatggatattggccgacacgaaaccggcggcttcggcgatcaactctcccaccttcaccttgtcgcccttggccaccttcgcaaccgccggcgcaccgatatgctgcgacaaaggaacattcaccacatcgggcaacgccagtacctcgacggcctccgcccgactcaacttgttatccgacggatgtactccgcctctcggaaatgtcttcatagcgtttgttttcggttttatcgttcggatcaggattcggttttttcggtcttcttctcctccgaagccggcttctctcccgctgccgacgtttgcttcgatgcaggagcggctttaggctccttgggcagcggctccataccgaccagacggatggcaccggtggggcattcgttcacgcacttgcggcagagcttgcatttccaggagtcgatgaaagccaggttgttctggatcgtaatggctccgaacggacacactttctcgcattttccgcagccgatacagccggctttgcaggctttcatcaccaccgcccctttgtctttcgacacgcacgaaacataaaccgcccgctgcttgggccacttcttccgcaactcgataatcgacttgggacaagccttgacacacgcgccgcaggccgtacatttgtcgaaatcgacctctggaagcctcgtttcgggatttatcgctatggcatcgaagttacaaaccgtcacacaatccccgtatcccaggcagccgtacgtacaccccgtttctccgccatagagcgaagcagccaccgcgcaggacgtaacaccgtcgtacgcattgatccggggacgtttctcgcaactgccgccgcagcggacggtagccacctggggctccttctccggagcagccttgcccaggtaggcagcgacggtcttcatcacttcggccccgcccaccgggcagaaaagcgaagagatatcggcccgcttcactagcgcatcggccaaaccgcgacatccggcgaatccgcagccgccgcagttcgcaccgggcagcatcttttcgacctcgtcgatccggggatcttcctcgaccttgaacttttgtgccacgaaatagaggatcagcgcggcaaggattcccaacacgcaaagtgtaagcactgtgtaaagtaatacctccatattattcggatattgtgaaatgaatcgcattatcgatcttccggcgcagaagccagagaatcccatagtacaggacgacagatcccaatcctgcaagtaccgccgccccatcgcccgcgccgagcagatagcagactgccaccacgccgatcaggacgacgaaaggcacgacataagccaacaaaaccgcgaccgctcccgtacgtcgggttatagcgaccgtcaccctgtcgccgggacgatacgtcgccgcagccggagtacgtatctccacgattttctgcccggtctcacccaaaccgcaggcttcgcgggccttgcagctcccacaagcgccatgagccgtaatttccacacaaaccctctccgcatcgacgcgcttcaccaccccgctatgttcgatacggtccatcgggtcactttacatatttatgggtcaatggcatacggtactcatgcccgaacgaggaggacgagagtcgaagcaccggcggatactgaaaacgcttcttttcgttgcgcatgaccatcgcatagattttctgtacctcgtcgctgtcgaatccggcattgatgatctcttcacgcgactgcccatcttcgatcagacggtacaggatggcatccaccacctcgtaagagggcagcatgtcgctgtccttctggttgggccgaagctccgaagaaggctctttggtcaggatgttttcaggaatgggagcaccgaatttccggttgatatagcgggccaggtcatacatctcggtcttatacagatcgcccgtcacgctgaaagcgccgccggtatcgccgtagagcgtacagataccgagcgcattctcgctcttgttggaacagttgagcaggacatagccgttcttgttctgcagggccataagcatcaacgtgcggatgcgggactggatattctcctccgtcgcatcgaaatccgtaccgccgatcaccgggatcaacgtatcgacgatactgcggtaagcctccgtgatcggcacgacatggaactcgataccgaggttttcggccagttgcttggcatcctcgaccgatccttccgacgaaaactgcgagggcatcatcaatccccgcacgttctccgcccccagcgctgcaaccgccagacaagcgaccacggcggagtcgataccgcccgaaacgccgacacaggcctttttatacccatttttaacgaagaaatcccgcagaccgcaacaagccgcctcgtaaatgaagcgggtacggtcgttcaccgacacagggacggactcgacgctgcaagcgggattttcggtatcgaacacctgaaagtcctcttcgaaacttttcagcaaccgcaccagcttgccccggttgtccatcacgcccgacatcccgtcgtaaaccagctccgtagcaccgccgacctgattgaccatcaccacattctttcccttgacgtaggcgatattccggattacgtcgtaccgacgactcaagtcgcccttgcggtagcggcgggcatggatgttgatgacggtttcgaccgacttgtcgaaatccggggtatgaaaaagatcgtcgcctacgaccagcgcacagcggcaaccccgtatcgtaacgtattcgcaacctttcgaaggggtcagaaatcccaattcgcggcgcacggtgatattctgttttcccacgtagcggacgactcttccttgttgaatcaacgctgcggcactgatcgtcccctccttggtgagaatcggaagccccacgatcgcatccaccgtatcgcattcggcggcaatccgcatcaacgcatcttcgcactgttccaaaaaaggatttttccgcagcaaatcgaacgaaggagcaccgctgatcgcctgctcggcaaaaacgacgaggtctgcgccttcggctttcgcacgacgtacggattcgatgatcttgtttgtatttcctgcgacgtcgccgaccgtataattcaattgagccagagctatcttcatctatcgggtatttcaaaaagttacatcatcgcaaaattaattattatttggaaaaaacaacgatttcgcggcaaaagtttcatccgaacgcaacgatcgtatcgaaaaaaagcaatcggggtttcgaaatcctcattcggaaaagaggccgtccccgtttcgactcaacgaatacagcccgaccttccgtgggaaggtcgggctacaaatcgttcaaccccaaacgcttgctattgctgctcttcgggatcggccaccagaatacgaccgcagtattcgcaaatgatgatcttcttgccctgacggatctccatctggcgctggggcggaatgcggttgaaacagccgccgcacgcatcgcgccgcaccgtcaccacggcaagtccgttgcgcacgttatgacggatccgctggtaagcctccagcaaccgcttgtcgatcttggcctgcgctttagccgcctgagccgtaaattccgccacctgcgaggccgtttccgcttcgatgctctgcaattcggtctgcttggcttcgaggtcctttcggcgctccgtcatcagggcctcggtctcctcgacctgcgcctttttgaccttgattccggcagcatactctttcagacgcttttcggccagctcgatttccaactcctgatactcgatctccttactaatcgcatcgaactcgcggttgttccggacgttgttctgctgctccttgtaattgccgatgagtatcttggcctgatccacctcgcgcttacgctgcttggagagagcattgagctcctcgatttcggcattgatattctcgacacgcgccttcaaaccggccaattcgtcgtcgagatcctgcacctcgagcggcagctcacccttcaccttgttgatcgaatcgatctggctgtcgatcttctggagatcgtagagggccaggattttctcctgcatcgaataatcaacttcagctgtctttttctgtgttgccatatcgtgtttttattgtttagacggaactatgtaaccgatcggattacgtgaatttacactcttgcgaaccgcaaaggtaaataaatttttcgataaaatatcaaacaaaatgtcgattgcgcaatattcgctctcgaaatggccgatatcggccaccacgaaggctccgtcgggggtcatgaaatcattgtatttaaggtccgaagtgacatacacatcggcctgcgcacgacgcgcttcgccgagcagcgaagctcccgctccggtacatacggccacccgccgtacctgctccttgaccagctcggaatggcggattacctgcaccggcaggcgctcctgaatacgccgcataaaatcccgcaccgacatggactgcggcagttcgcccaccaccccgaagccaacccgcccgtccgcaggatcggtcggttgcagcacccgtaactcttccacgccgagcatctccgccaaccgccaactcatgccgcccggcgcactgtccaggttggtatgacaggcgtagagcgctattccccggcggatcgcccgctcgacgcaccgctccacataagaggccgaattgaaccgcttgagggcatggaaaacgatcggatggtgcgtgactatcagatcgcaccccgtctgctccgcctcgtccaacacctcctcggtcacatcgacggccagcagcgcctgatgcacttcgtcctcgggccgtcccacgataagaccggcattgtcgtacgactcctgcaaacggagcggagcatatcgttcgatcacttcggcaatatctctgattttcataatcctactacattatttgaaaaggcaattatattttcaacgtaccatatccgacggtcgcttgttcgcggcctgtgctcccatccataatgctgccccaccccgaaatcctcacctcgaagggacttgcggcgctacgcgccccaaaagatataccgaagtatcgggttcgttcgcatacccggtcgggcctatcgccgtagcggtccgcaacgtcaccgccccctccgaatcggaggcgaaagcaaaatgtacccgcctgccgtatttcaaaacgtccgtctaaaacaacgactgttcatagaaggcgaacaactccttgctctccgcctcctctttctccttcttgcgccggggctgacgcgccgccgaacgtttcggcgccggcttttcgctccggggacctggttcgatcacctgcacgggtcctttactctccgctccatcccctccggcatcgtccgccaactcctgcgcggcaggcttcttccgggtacgaaccgggagcgccgatacttcggccgcctctccagccccattttccgcgacaaccgcccggtcctccgcactctccttgagttcggcccgcacctcttcgagcagggcccggacacgctgaagacgttcgagcagctccgcatcgcgcgaaatggttcctttattctgtttcagacaacgggcagctccgtcgagggtcattccccgctccttgaccagatgatagatcaatttcaggttttcgacatcggccggagaaaaaagacggttgcccttcttgttcttctgcgggcgcaggatatcgaatttcgtctcccaaaaacggatcagcgaagcattgacgtcgaacatctccgacacctcgcccatcgaatagaatagtttcttggccataacatgtacaattacaggttgaatatccgcaacgagttgggatacatattgtttacccggttctgaatccgcttggcgaaacccagggccgctcccccgtgcgtcaccagattcatcccctcggcgaaagccgcagcctccgcctcctgcttgcgcagaaaccgcagcgcctcctcttcggacaactcggcaacaggcaccgctccgcgatccaatccgcaaaacatcgccagcgcatgatcgggcttgagccgctccttgaagatctgccccatcgcaacgcccgaggcgatcacgcgcagcgattcggccagcattttcaccgcctcgtactgcgattcgtaatacgcataatagacatccgccaccgccgcaaagcgcatccgctcgggttcggcgacccaacgggacagttccgcacactccctgcgtccggcgggcgcgaaaatcgttcggcgggacttgggcacacggacacggcttccgccatcggacaccttacgggccaccgccgcaaaaaatccctcgccccgggtccggtgcggatagaaacggaacgtccggaaaggaccgacccgaccgcaaaccacaccccacgccggcgggcaatcgaaagcggtcgattcgacgatctcttcacccgcttcggccagcaatccctccagcgacccttcgttttccagtcgattgaacgtgcaggtactgtatatcagcaatccgccgggacgcaacgtcttccacgcttcgcgcagaatctccgcctgccggacggcacatattttcacattgttctcgctccactcgtcccgtgcctcgggtattttgcgaaacatcccctcgccggaacagggggcatccaccgccacgatgtcgaaccacccttcgagcaccgcgatctgtgccggctcgttcaccgtcaccgccacgtttcccagcccccacttgcggacgttatccgccagaacagccgcccgctggcgattgacttcattcgccactaccaacccgtcgctacccgcgagcgacgcatagagcgtcgtctttccccccggcgcggcgcaaaggtccagaatccgttttccggcgacctcctccccggccagcacgtgagccaggaactgcgacgaagcctcctgcacgtaataagccccggcatggaaagccggatcgagcgtaaacgaaggccgctccgtcaggtaacgtcctgccggcgaccagggaaccgcctcggctccgctccagcggcaggggcgctgcggatgcagacggacggatgtcggcgccgggccttcgagcgcctcacacagcgcacgcccctcctccggtcccagttcggccataacccgccgcgtgaaagattccggcaacatagggactattttttagcggtttcgagctcctcccgcttccggtcgagacgagcgcagatcttctccatcaccgcagcatccgcgacgaaatcctcacgatccttatcgatcacgagcacttcgccccggtagatatgttcgatccagtcgtcgtaacggtagttgagccgccgcaggtactgttcgtcgatgttcatttcgtaggcgcgaccccggcggcggatctgcgaaatgagcgtcggcacgctggccttgaggtaaatcaacaggtccggccggggcaccaggttggtaatcaacccgaagatactcatataagtatcgaagtcccggcccgacatcagccccatgcgatgcaggttgtcggcgaaaatataggcatcctcgtacaccgtccgatcctgaaaaatatcgaccggaccgctgcgcagaatatccatcgtctgctgaatgcggctgcccagaaaatacatttgcagattgaacgaccaacgattcatatcgttgtagaaatccccgatgtagggattgtcgctctgctcgtaataggccttggcgccgtagcgctcggtcagcatctcggtcagcgtggttttgccgctgccgatatttccggctatcgcaatgtacataaatcggatgttttgacgacgtcacgcacttcacgccgcactgcggggccccttcccggtcccgccgcccggcaagtccaccgtctgcggcggcacggcagaaaaccgcctcccgccgcaatccccggcccccggcaaagcgacgcgtgtcgtcgcgttatttattgttcaatcttcagtaactgttccacaaccgtacggtcgttgcgcatacggggcagcttgttcttgcccgtcttctgcaaccagcgcagcgtcgttcccggcggcacggcatggatgcggggcggatcgagcgccgtctgccgcttggcgtcgtaatccgaattgacgctgcgaagctcccggtccagcacttcggcaaaatgctccggcgtatcgggccgctccgaaaactccagcacccattcgtgcgctccccgggtattcagccccatgaaacagggcgccacggagtactcttcgaccaccgcaccggtttgctcgcaggccgccgcgagcgcccgctcggcgttatccacgatcagctcctcgccgaagacgttgatgaactgacgcgtgcgacccgcgaaacggatgcggtagggattcgtcgaggtgaattccaccgtatcgcctatctcatagcgccacaatccgttgatcgaggtcacgatcatcgcataaacctctccgacccgaacgccttcgagcggcacgatctgctcgccgctgcgaaattcgtaataagtcccgtaatcgagcatcagcagcatatcgtcccgcgtcagatcgtcagccagcgcgaaaaacccctccgaagcgttgtaagtttccagataggtcatcccctccgacgggatcagcttggcgaacgacttgcggtagggcgtaaacgccacgcccccgtgcgcaaaaaattccagatcgggccacacttcgagcaggttgctcttgcccgtatattccaacacccggcgcatcagcaccaggttccacgaaggcacgccggcaaaggccgtgatcttctctcgggtacactcccggcagatcccctctatcttccggtcgaaatccggaatcagagccgtctccatcttcggcgcccggaaccaaccgctccagaacggagtctggctgatcagcacagccgacagatccccgatgagagctccgttctcccggacatacgaaccgccgagcgtcagcgtcttgccgtcgaagatcttcgtctgcggcttggccgaagcatacaccgccgccacgtcccgcataccgagcgtatgattccaccacacggactcccgcgtgacgggaatgaacttgctgcggtcggacgtagttcccgacgaacgggcgaaaagcgtcacccgccccggggctgcgacattcttctctccggccagcatccgctcgatataaggcttgaaactctcgtagtcctgcactccgacccgtgcggcgaacgcctcgggcgtaagatgcttggcaacaccgtgccgacgaccgaactccgtatcggccccccgcgcaatgagctgtcggaacatctcggcctgcacttggtccggatgtcgccgaaaacgatctatcgccttcatccggcgggcgaaataggtacgtaacaaactgttccgaatcgacatcctgcgctgctcctccttatcgttaattaaagaaatatccaattttggagatcgacgccggcatagcgaaaaccaccacgcgatcgtaggcgctcaactccatgtttcccacggcgatgaaaaccttgtcgccgcgcaccacgccgccgataatcgtatcctgcggcagcttcaactccttgatcggagccttcgtcgccggggcgttgggcttgacgatgaactccagcacctcggcctcgctgcccgtcagacacttgatcgcctgcacgtcggttgacatcgtgaagcggaagatgttcgacgccgtaaccagtttcttgttgatgatcgtatcgataccgatactctcggccagattgatataatcgaggttctcgatctcggcgatcaccttcttgacgcccatgcgtttggcgagcatcgccgccagaatattggtttcgctgcgccccgtcaccgcgataaaagcgtccatattggccagcccctcctcgagcatcgcttcgatatggcggccatcctcattgataatcaaagttttgtccaacaattcggccaaccgataggccttctcggcattgtagtcgatcaacttgatattgacctcgtcctgcaattcggtcgcaatgcgtatgccgatgcgcgaaccgccgaggatcatcatgttgttgatctccacgttggaatgccccgagaactccatcacctccttcacggcatcctgccgggcgatgacatacaccatgtcgccctccataaatatttcatcctgccgggcgatgatggtctgaccgccgcgagcgatcgccaccgtccgatagctgagctgcgccgcatcgtccttgaaacccgaaagttcgcgtccgatgagggacgaggtcggatcaagacggaaaaccacgagcgaaagccgtccgctcgagaaatcgacgtactccgtcgtcgaagtgtgccccaacagattgatcacctcctgagccgccaccttttccggatagaacaggtagtcgatacccatgttgataaaaatctccttgttattgggctccaggtattcgttgttgtcgatccgggcgatggatttcttggccccgagctgcttggccagcaccgctgccaccacgttgtcgttctcgacatgattgacggcgatgaacaggtcgcactttcgcaccgaagccttccgcaacacggcaaaggtcgtggagtcgccctcgaccgtcagcacgtcggccaggctggccacatcggccagcagcttcggatcgctgtctatgaccgtgatgtcgtgcccgttgccactgagcattttcgccagatggcttcccatttcgcccgcacccgcaataacgattttcataccggatttactctgtcagcatacgcccggatcattccgggcagcatttttgcaattaataacacaaatgtataaatttgcatcggaacacccaaatttccactattaaatttcagttaccatgccaacctggttaatcataattcttttggcgattctggccgtcggacttttcgtcctggccatgtcgctcaccctgattttcaagggacaccacatcgactccgaaatttccaccaacgaaaacatgcgcaaactgggtatcaaatgcgccgttcaggagacccgcgaacagatgacgggactcgaagattgcgcatcggagcccggatgctcgggcaactgcgccgcctgcacccccgaagcggcagccgcagtacacggctccgcaaaaaaataatcggcgacaaattctccgcaaaccgaaaacacgggcaatctgaattcagattacccgtgtttctattttctcggtttcaaccccacgatgccgagaggcggtcagtccgccgcagaacactccccgaccatcatctccgcctccgacctgcaacccggcattttacgggcgcgacagaaaaaccaagaattaaccagatccgtcttgttgtaacgcaacggacgataatccggcagcgaaagcgtttcgccccctacttcggagagaatcaactcccccgccgcagtatcccattcatacgtggaagtagtccgaaaatagtaatccaccgcgccttccgccagcaaacaaaacttataggagctgccctgctccacgacctccagatcgggatggctctttcgcaattcctcgatatactccgcgagttcgggcgacttgtgcgaccgggacacggcgacccggggatgttcatgccgcgccgactctacaggcaggcgccgcatactttcgacgatctgcccgtacgagtattccgcgtcggaatcggccgccaccccctctttcaggaaagcaccgcccccgcgccacgcgagatacatcttgcccaaatagggaacatacaccaccgacgccacgctccggttattctccatcagggcgatattgaccgtaaactcgttgtttcccttgataaactccaccgttccgtccagcgggtccaccaaccagaacagctcccagttgcagcgctcttcgtaccgcatctcacgcccctcttcgctcagaatcggaatacgggtaggtcccagataggtcttgatcgtttcgtgcgcccggcggtccgcgacggtaatcggagtcttgtcgctcttaatgctgatgtcgtaatcctccttgtttttgtaaacctgcataatggccgcaccggcccgcaccgccgcattgaaaaggttgggcaaaaggtatgatttgagctcgttgtcaagcataatgatatttttgatcggtaagacaggataaaggtactatataattcccggatccgtaaaatttccggcaataaaaacccggcagccgttacacggccccgagcgcagcattccgcttcccggcgggaaaaggtgccgaaacagccccgagccacagaaacagtccccaaagcaacagaatatcgagcagcaacaaagtcatcggcagccacccgaacgaccacgccgcaatcgcacatccggccaaaagcgccattccggtcaaagtcaaaatccagacatagcgggacgggcgcaactcataaaacaacggttcgtacaacgtgatcctctccttgcgggacaattcatacccgtcggcccggtcgaaacgacccaaccggccgacatactcccgggcataaagtcgcagcgaaggtcctacggcagtccgcacgaacgatatagagtggatcggatgaaccgccaactccatcgccagacggtcgatcgcaccccgtttgaggcgcaggttgcggccgatcggcaaaatataatcgtacgacgcggctcgcacggccgcatccgacgaaacggcggaaaacgcctccatctgatcgagcagcgtcagacgattgacaccccgcgtctgagagcggtagaatccccgtacacccaactgagaacaggcttcgaacggatgataatccacccgcatcatccggtaatgccggagcatctcgtgaaacaactccggtttcagacgggcgtccatcaccaccagcaattcgtaactggcatactccacatcgagcaggtcggccacctgggaaacggaatctatgtcgtggcaaatcgccgaaattccgataaaatcgggcgaatcggaaaccacgccgaacatacgggacagcaaacgacgcttgttacgcgccctcaacacttgaactaccagccaccagacacgcaccacgacggcaaccgtcacgcaaatcgcacctaactcaatgaaccacatactatccgacgttcaatttatacgaatcgaccaacgacacataatatcgcttctcctcttcaggaatgaatacctgcaaagcgttcgcggagtatccctgccgggcaatataacgcagcagtaccctgcgctgaacgggattcattccgcccacgaatttttccacttcgggacgcgtaatcacactgtgcagcgtacaaagaacgtacatcgcaccgacggactcctcggaccggttttcggcaacgatccgcagcaggatctcctccgcatcttcgattccgaaacgccaaacgacactgagtcccagcatccgcagattccggttcggcgacaggatcaacggttcgtaatcgacaggctgcacattctggcgcaacatacggagcacctcggacagttcgaaatacgaaagccgatgggaataggcgtcgattttcgaggaaagcgccgacatatcggccatcatctgcacgctcaacgcacagaagcggacataacggttcctgctatgcgtataacgttccactgcccgaactgttttttcatcgacgggcattcgggaaagcagatgcaggtaataagccctgcggtaacctccattgcggcgaatacgacgcagcaggaaaacatcaagcctctgacgctcgacgatccgacgcaacggcgccggatcgagcccgtacgtagaatccaccaggtcggcaatatcctcggcgataaggcgcctatcccgcgaagacatcgcctcgggacagtgagcgcactcttcggttccggagaagagcatccacaacacgctgttcaaatacttttcgcggcgctcggcatcccacctgaggcaaaaacgacctgcaaaccgttgcacgcaccagcttccggccaaaacagctcctgaaaccaaaacgaccccgatgcaccaccaaaacgtcatttccatttttcccgatcgattagctcgttgatgactttccgccgcaaccggtgcaggctcaccggcaaggtcatgtattggttcacgcccatccggtacatactccgtaccatctgttcggattgcggccacgaaatcacgaagacccgcgtacgccgggttttatccgcccgcagcgtgtccatcacttcctgccggcacatttcggcagcagtacccataacgatcaccaggtcgaaaggcgactcccggtgaagcacaagcatcgcaccgaccgtatccgcgcactccacacacgcatccaggtcattcaaggaaaaagccacggccttgcgcaagacgaagtcctccgacacgattaagatacgatacatttgatatacatactgtttacacgatcaaagatacaccgaaaaacgtgccaaaacaaatgtctgcaagaaaaaattgcctgcccttgtttattcaataattatccttatatttgcacgttgaaatttatgtataaacacatacaatttaatcaatgtacgttatagtagagattgcaggtcagcaattcaaagctgaaaaaggtcggaaactctatgtccaccgtcttcccggcgaagaaaattcgtcggtgagtttcgacaaggtcctgctcgcagacaacgacggtcaggtcaaggtaggtgcacctgtagtagaaggcgcctcggtgaaatgtaagattcttaagcacctaaaggacgacaaagtcctcgtgttcaagaagaaacgcagaacaggctatcagaagcagaacggacaccgtcagttcctgagccagattctcgtggaagaaattgtcgcataaccttaaatttagagaaacatggcacacaaaaaaggtgtaggtagttcaaagaacggccgcgagtcggaaagcaagcgactcggcatcaaacttttcggtggtcagttcgctaaagctggcaacatcatcgttcgccagagaggtactgtccacaatccgggcgagaacgtaggtatcggcaaggatcacacgctcttcgcactggttgacggcacggtttccttctgcaaaaaacgcgaaggtaaatcgtatgtaagcgttactccgttgagcgagtaaaagaatcgctatacagataaaaaatgctacgagtttcgtagcattttttattttcccaaaactatctatcattttcctcctttaacggaaatttcttgattcaatgtattcgttatatctgttataaatcttccccgttagcacgattgtattcgttatcgtaatacattattatgtaatattttccgtaaaagtctgatatcataaaccacacaggtctttttgaacaagaataaaaatcttccaacttacgtcttaaacggaccgctgcaatctctgtttcaatttctgcggtcggatgctccaattgttcttccgtatatttagataacagttcagggtctgattttgccgtccaacctttttcatcaaatgcgagttgatggaaaatagcctcatagcgtttgtcatgaactaacatttcataagaaatatcttcatcttcaggaatcatacaattatctgccaatgatgtatatttaggattatcagcgaactgttcacaaaggttattaaatcttattcgaatattcgtctcatcaacagtattaacatcagcaaccataatacggctaactttatttttggttgtcactacataaatatcgacttctagaccattaaattctcctcttagagcacctgtcgattgattatattgaaaacctttttccttcagcctgtggatcatctcactcttgctcccatcgaccgggattccgagaaatcgggtaacgtcttgttgcgcatgtgcagccattgaaaacagaagcgacattgtcattaaaaataaatttttcatatcatcaagttttttctgtcctccagctgccacaagaacctttataaaatacaagaagcgtggagctgcaatgccacatcttaagttagaggtcctgagaaaaccttgtagtacagataatggatatagcagcccacgctaaagcgtgagaaccactatgccaatccttgtactacgtttgaaatttctcaggtttctaacttacaagacaagcataacgcttctttatatctaatatgtcttgaagagggattgcacccaattcgaatgtaaaagtaataaatatctgcgacaacccctcattccgcaacgaatattttgtgtagcgaacgaatcggaaactctgcacgcccctctccgcccgcctttctcttctgaccggatggaataattacgctccttatccgcgtctcgaattgctccttcaaccactccaccgggtttccggctcatgacaagcactaatttcccatcgtctgtcggagagcgtgcgaacggcagacgacatcctcctacttcgtaaaagagaaataaatgtaaattatacttgcattattgtaaaatatgctttacatttgtcttgtcaataataatcacctaaaaattaggacgactatgaaaacaactcttttactgcccaacggttttaagaaaatcggctgggcgatcttcgttcccgcatttctgctcggctgctcgatctgcttcttcggcgaaaatttcgaccgctggcttttccgcgaaacggtaatgaacaacatcgccatcatcggcacggtcgtcggcgcccttttcatcggcttctcgcgcgaaaaaatcgaagacgaaatgattcagcacattcggctcaacgctctgatggctgccatgtggatcaactacctgcttctgatcgtcgtgtctctgtcgatctacaacatcaactaccttacggtaatggcctgcggcatggccactccgctggtcatcttcctgctcgtctatcacttcaatctctacaaactgaaccgcaacctgcaccatgaagaataacatccgtgtccaacgggccgtcgtccgcctcacccagcaacaattggccgaacaggtcggcgtcagccgccaaacgatcaatgccatcgaaagcagcaagttcatcccctcgaccctgctcgcactcaagatcgcacgtaccttccggcaaccggtcgaagcgatcttccaactcgaagaggaagattagaaccggtgcaacaagcacgataaagggcagcctcgatcgaggctgccctttatactacggaatattattcgtttagtattcgatcttgctccgacgaacatacccttcataccgccaccgggcattctgttcggctgcctggaaaagcgcttcggcatcctccggagaaacggccttgagcgacgtataacggacctccttgagcaggaaatcgcggaacttcgcccagtcgggttctttcgaatcgagtacgaacggattcttgccctgctcctccaactgcggattataatgccacagatgccagtaaccgcactctactgcctgcttgccgaccgtctgtgtccgggtcataccgcccttgataccgtgattgatacacggcgcataagcgattacgagcgacggaccgggataggcttccgcctccttgaggacattaaaaagttgggcctgcgaagcaccgatcgacacttgagccacatacacgtagccatacgtcatcgcaatcgcacccagatccttcttgcggatgcgcttacctgccgacgcgaatttggcgacggcacccaccggagtcgccttggacgactgaccgcccgtgttggaataaacctccgtatcgagcaccagaacattcacatccagccccgaagccagcacgtgatccaaaccgccgaaaccgatgtcgtaagcccaaccgtcgccgccgatcacccattgcgactgcttcaccaggaaatccttcaactccagtatctgccggcaatagtcgcagccgcaagcctccatcatcggaaccagacgggcagcgacttcggccgaccgggtcgacgaaacccgtgcttcgatccactcgcgcataacgcccttcagctcttcggagcaacgctggcactgggcgatagcctcttccatcagcatctgaatccgatcgcgcagcttctccgcaccgacatacatacccagaccgaactcggcattgtcctcgaagagcgaattggcccatgccggaccgcgaccatccgcattcttgcaataaggagtcgaaggtgccgaaccgctgtaaatcgacgtacaccccgtggcattggccaccatcatccggtcgccgaaaagctgggagatcgccttgatatagggagtttcgccgcagccgccgcaagcgcccgagaactcgaacaagggctgctcgaattgcaggttcttgaccgacttggtcttatcgaccaccttcttgtaaccgatatgtttggtgatgtaatcccagttcttctgctgtccgagttgactttcgagcggcttcataatgagcgccttctccttggcgggacaaacgtccacacagttgctgcaccccgtacagtcgagcggcgagatctggatgcggaacttatactccttcgtgtcgcccaatccctgtttccattcggtgcccgatgcagccgcctcggtctcggtcgccaggaaaggacggatcacagcgtgcggacaaacgtacgcgcactggttgcactggatacacttatcgacctgccattcggggacattgacggcgatgccgcgcttctcccatgcagcggttccgttctcccacgtaccatcttcacgtccgttgaatgccgacacgggcagcagatctcccttgagggcattgatcggatcgacgatgttgcgcacgaactccggacgagccatatccacgccgtgatcggccggtttcagctcgatattcgtccactcggccgggacttcgaccttcacgactgcgttaccgcccgcatcgacggccgcatagttcatattgacgatgtcctcgcccttcttgccgtagctcttatagatcgctttcttcatctcctcgacggccttctcgaaaggaatcacgttcgcgattttgaagaatgccgcctgcatgatcgtattggtgcgcgaaccgagccccaactccgccgcgatcttcgtagcgttgatgatatagaagttgatcttattcttggccaggaaaaccttcatgtgatcgggcagcgtccggcaggtcgtttcggcatcgtgcaccgagttcaagaggaacgaaccgcccggcttgaggcccttcagcacgtcgtacttatccacgtacgaaggcacgtggcacgccacgaaatcgggcgtggtcaccaggtagggcgaggtgatcggcttgtcgccaaagcgcaggtgcgaagccgtgtagccgcccgacttcttcgagtcgtatgcgaaataggcctggcaatatttgtcggtcgtaccaccgatgatcttgatcgagttcttgttggcacccaccgtaccgtcggcgcccagtccgaagaagagagcctcgaacgtaccgggcttcgccagcgaaatctcctcgcctacgggcagcgaacggaacgtcacgtcgtccacgatgcccaccgtgaactgattcttgggttcgttcgccttcaggttggcgaaaacggccagcatttgtgccggcgtagtatctttcgacgaaagaccgtagcggccgccgataatgagcggcttgcgctcgcaggggatctccttgcaggtggcgaacgcctcgacgacatccatatagagcggatcgccgttggctcccggctccttcgtgcggtcgagtacgcagatgcgtttgaccgtctggggcagtacagccgtcagatattttaccgagaagggacggaacaggtgtacggtcaccacgcccgttttctcgcctttggcattcaggtaatcgaccgtctccttcagcgtttcggtcaccgaacccagcgcaatgacgacatgctccgcatccggagcaccgtaataggtgaacggcttgtaggtgcggcccgtgatctcggatattttctccatcgcctcggctaccatgtcgggaatcgcatcgtagaacttgttcgacgcctcgcgggtctggaaatagatgtcggggttctgggccgtgccgcgcgtaacgggatgagccgggttgagcgctccggcacggaacgccttcagcgcgtcgcggtcgagcatcgcggtcagcgccgcttcgtcgatcagctcgatcttctggatctcgtgcgaagtacggaatccgtcgaagaaatggaggaaaggaacgcgtgccttgagcgacacgatatgcgcgatacctgccaggtccatcacctcctgcacggacgaggtggcgagcattgcgaagccggtctgacgcgcggccatcacgtcctgatggtcgccgaagatcgaaagcgactgggccgccagcgcacgcgccgatacgtggaatacgccgggcaacaactcgccggcgatcttgtacatattgggaatcatcagcaacagaccctgcgatgccgtaaaagtcgtagtcagcgcaccgctttgcagcgatccgtgcacggcgccggcggcaccggcctccgactgcatctcgactacccggactgtttctccgaaaatatttttacgaccttgagcggcccactcatcgacaagttccgccatcgtcgaggacggagtgatggggtaaatcgccgcaacctccgagaacatataagctatgtgggctgccgcgtaattaccgtcgcatgtgataaatttcttttctgccatttttatcggtattagattgtactatttcagctgtgaaatctgcctgaatcggcacaaagttaaaaattccaaacgaaaattccgccatatttccggacaaatatcgcaacgtacaatgttataaaaataacagtatcaacaccttctatcgaaacgcttcaaaaacaaggagaaacggccattccatttcggagcacgctttttgcaaataaaatcgtacctttgaaaaaatttgcaacaacgtgatcaactaccagaaacatacgcttccgaacgggctgacggtcgtcgtgaaccgcgaccgctcgtccaaactggccgccgtaaacctgctctacaagatcggggcccgcaacgagaatccctcccgcacgggcttcgcccacctgttcgaacatctcatgttccggggcacgaaggcggttcccgacttcgatacaccggtacagatggcctgcggggagaacaacgccttcaccaacaacgactacacggacttttacatcaccctgcccaaggacaacatcgaaacggccctctggctcgaaagcgaccgcatgacgggactcgacatctcgcaggaaaacctcgaaaccgagaaacgggttgtcatcgaggagtataaacaacgatacctcaaccaaccctacggcgatatgtcgatgctgttgcgggccctggcctaccgcgtgcatccctaccggtgggcgacgatcggactttcgcccgatcacatcgccggagcctcgctcgacgaagtgcgcgatttctaccgccgtttctaccacccgtcgaacgccattctctccatctcggcagatatccccgaagagcggacgatcgccctgtgcgaaaaatggttcgacccgatcgcggacaatccgcaacctgcggcatcgcttccgcaggaaccgccgcaaaccgaatcccgacgggaggaggtcgaacgcaacgtaccagccacgatgatcgtactggcttaccacataggctcgcgcacttctccggacttcttcctgggcgatatgacctccgacctgctggcaggcggagaatcgggacgcctctatcagcatctggtcagagaacagcggctgctgggaagcgtcaatgcctacgtttccggagaagtcgatccggggcttttcgtcttcacggcccagttgctgccctcgaccaccgtcgaacaggccgaagcagccctgttgcgtgaaatcgaaatcctgcaaacggagaagatcgacgaatacgagctggagaagatcaagaacaaattcgaagcgaataccctgttcggcgagcttaacgtgatgaacaaggcgatgaacctcggcttctacgagatgctcggcgatctgcccctcatcaaccgggaagtgacgatctaccgttcgcaaacggccgaacagatcgccgacttcagccgccgcacgttccgtcccgaaaatcgttccaccctaatctaccgagccaaacaatgaaacaaccgcccctgatcactccccgcgaggtcgatgtaccccgcgcccagcgccatacgctcccgaacggagcctccctctacgccattccgtccgacgatttcgaagtcctgcgcttcacgttcgtcttccgcgccggatcgtcgatgcagcacgcgcctttcgcagcctccgcgacggccaatatgttgagcgaaggcagccgcgacatgacggcccggcaaatcgccgaacggctcgatttccacggttcctacttcgaagtcaatgtcgatcgggactacgtatatatcagtttcagttcgttatcgaaatttttcggcccgaccctcgaagtcgcggaacaaatcctcctgcaaccgcttttcccggaggacgaattgcgtgcctattgcgaaaaacgcaagcagaccctcacgatcgaacggcgcaaggtcgataccgtcgtgcgtgaaatcttcgccgaagctctcttcggcgacaaacatccctacggcatctcctatcccgagaaagattacgacacgctcacgcgtgcagacctggaatcactctaccgccgactctatacggccgaaaactgtctggtcgtatgcagcggccgcatcggggaggaggagttgcaaggcatcggcgccctggccgaaaaactcccccgtgccgaccgcagcgccacagccgattttccggctccccgcagcgaagcctatcgtttcgtcgaaaggcccgacgccgtgcaatcctcgctgcgcgtagggcgtctgctcttcacccgcacacatcccgatttcgtcgggatgcaggtcgtcgctacggtactgggcggctatttcggctcgcggctgatgcaaaacctgcgcggcgagcacggttacacgtacggcgtgggtgccgccatggtcaatttcgagcgggagggttacctgggaatcgctgcccaggtcggagccaaggtgacggccccggcacttcgggaagtttacaacgaaatcgaacggctgcgccgggagccgatgcccgaagaggaactttcgctggtgaagaacatcatgacgggcgaggtgatgcgcatcctcgacggaccgttcggcatcgccgatgtgacgatcgaaaacctcctctgcggcacggacaacggcgtcatcgaagagaacatccgccggatacaggcaatcaccccggccgaggtacaacggctggccgtcaaatacctccgccgcgaagatcttatcacggccgtcgtgggagcggtcgatccattcacaaaattataatatggattctccctcaaacgcacccgctccggctaaaaaagtcggagcggattaaaatatttatccctgaataaaaagtttaaccaccttattactaacacgatttactttcccccttttattctattacaatttctacacagcatttggcaattttcggcaacggttgtacctccatctttccaaggcgtaatatggtcggcttccatttcttctagttcaaagtattttccacaatgtacacagatacctttctggcgttcgtacgcctctctcttttgcttcttatcgaatgaacggaatgataagtcgcgtaaatcaccactcaatacataacgatagataccagacttcttcattatctcatcatcttccattaggtcgtgtatctgcttttcaagtgcgtttatatcgtataaattctctccgaactcgtcaaacatagcaccccaatcaagacctttcatctccttgcggtagtgagggaatgtcgatcgtacccaagtgataatctgcatatagtacgcccataacttgttagcattaggttcaaactgatgaatcgccatatatttgtcaatcggcttttcatcgtgtatgccatcgtgtcgagccgcccatttcaaaactgtttcgagatatgcttgctctacggtgtttccactcatatagtcactgccaatcttataagcgggacaaccattttttgagaaatggcggcgtgcatcagttacaaatgggcctgcatacacagcatttcgcaactcttggtcaagcaacttttcaccagcaatattgatgacgcgaaaccaatccaacttttctttgtctgttccgctataaaaatatacagtcaattcatagtcgagaaatgattgcttttcttcgtctgtcagtgtattgaaaaacagcactcccctgtccttatctacgatgttgaaatcatgcgtatagaactcgcaaatcgaaagcgtgcgttgctgcccgtcaatcatttcgtatttgccatcttcacagacactccaatacatgatgttgagcggaaactttttcaatatggtttcaataacagcctgcttttgcttttcatcataacgaaattccctttgatacggaggccggacatcgagcttgcctccgtatgcacggacaccattatcgggatcattgctataacccgcaataaggtcacgtatcggtatagatttaagtttaatatcctccatagttatttctttttgcggatcaacattctcgcgtattttctctcgccattaatatatggccggtcatatttcttatgaccaagttttataagggaaatttcttccttcgaatcaacacacgagcataagtcactactaataagcgacttatacccccccctaccatctattttataatatgccgctcgacgattcagatcaccaaaattagatgcatcaccagccgtatatgtctttgtagttaatccatatatattacccctatccgttatacccaatatctcaaattggtttggattatacttatctaaaaatgttattggtacacccattaccccatcatagtcattgggaatcaactctgtcttactaacctcaatagcattataattgtcatattgtggatactcctctggtgaatacgacttgtataacactatatcttcatatctttccttataatcaagattagtaaaccatcttacacccttaacacgaatatactttcttcctgtttcatcaacgccacatccggtagcatttaattcgtaattatctgggacccaaaatttcctatcgccactgtgaatacttgcccccatccatattttattttgcataatcaaaggaaagatttctttgtatgtgattgcattaacatttccaataatcagaaatttcttatcatactcaataagttgtgctacatactcgcggaaaagagagaatggtgggttggtaactacaatatctgcctctttcagcaactcaatacactctgcactgcggaaatcaccatcacctttcagtggatgaacacctatttcatcggctgtcggtatatggtcgccatttttatcgccttcataaataagatatacagcctgctcgctcttgttagtgctaaataggtctatatcttgattcttatagcaagtggttatcaacttctttaatccaagaaactcaaaattgtaggcaaagtatgtaaaaaagttgcttacgcgaggatcatcacagttacacaaaaccgtcttatcacgaaaatattcccggtaatgttttaactcattatttatatcttcaagttgagtataaaactcatctttcttcgcctctttagccttatttaagttattatttgccatatcaatttatcaaatcattgacctctacattgacgggcgataatctttttgtatttccaaaaataacgaatttgtttgagtattatttgaaaataacgaacagattgtttccttgattgtcccgtaacaaagccatttacctatcttctttcgtccgacaagtttattttttaattatcacaccaataataacatcattatcaatcagataaaccctctacccactgcgtcagttcgacgaaatcggcgaccgagagccgctcggcacgctgcgtgaagaagggatgttccgcccctccgaaatcgccgaaagccgcccgcagggagttgcgcaacatcttgcggcgctgaccgaacgaggccttgaccacgcggacgaacaaccgttcgtcgcagtcgagccgatccactccgttgcggcgcagacgcacgacagcgctcttgactttgggcggcggattgaacaccgtttcattgaccgtaaacaggtactctatgtcataccatgcctgcaacaacacgctcaagatgccgtactccttcgagccgggaggctccgccagacgcacggcgacctctttctgaatcatcccgacgcactccggaatcaagtcccggttttcgagcaccttgaaaaatatctgggacgaaatattgtaagggaaattgccgatcacacgcaatccttcgggaaacagcgtccgcaaatccatttttagaaaatcgccttccataaggcggggtgtaaattcgggataatgcgcgtgcagatacgccacgctttcggagtctatttcggcaccgtatgtcacgacatccgtccgtttcagcaaaaatcgggtcagaacacccataccgcatcccacctccaacaccggacacggtttttcggacgtaccgccgcccagcgaatcgcatattttgcgggcaatattgagatcgaccagaaaatgctggcccaacgctttcttcgctcttacttcactcattcgtttcggttgaatatctttcccggagcctccatcccggactcttccggcacagagccgaccttctccgcccctgccgacggcgaccgcttcgcgcctaccgtccggcacctcccggagcggacgccctcttcggccgcttatcggaaacgtcgtaccccttcttcgaacgccgtcgggtgcgggacgcgcacccgttcgattccgctccgaccacagaaacggcccgaagccgcatccgtcggccggcatgttttccctcaccggaccggctctcgcccaacgacacccctctgccctgatttaccggccgcagaaaacttcggactggcctttcggacgacacaatcatcagaggtatttcttcacatcctcgacatgcttgcgagatttcttgtgaaattcgttgtaaaacattgcgacgcccgcgacgacgaaaagcaccggaataatcaggttcgcataatgaccgtcgtgcaagcaccaaacgacattgatcgtaagccacatgatcgtagccagcataaaaatcaacgcgacggtcgccgtcttcttgttaaattgtgcgttcttctttttcatagcttctcgatttatggttaaacgattctcatttgcttttcttccgctcccgctccctgcgccggtaatccaggataagggccgccagactcccgccgagcgccagcaccaaaagtgcgcctccggaggtcggatgcacaaacagacatacggccgtcaccacgatcataatcgctatggatgtcatcaatattaccctgaatcgctgcaatctataccccatatctgcataagttcgcgggatttcccgcactctgttatacataaggaacgcctctgcccgccccgtcagttgccctgttcgcacatgaacttgatacgtaccagccggatctcctcctcggtatagtcgccgcccagctcctcgatcgcctcgtcgagcgaatcgctctgggcatcctccttgaaatagaggtaaatatcattggatttatcctcgtctatcacctgttcgatgtagtaggaaatatccagtttcgttcccgaattgacgatcccttcgatctcggtcagcagttcgtcgaaatcgaggtctttggtccgggcgatatcctcgaaatccatcttgcggtcgatggcctggatgatgaaaatcttgttgccggacttgttgcccaccgacttgacgatcatatcctgcgggcggacgatctccttctcctccacataggcgcggatcaggcggatgaactcctcgccgaacttgcgggccttgcccacacccacgcccgagatgttctgcatctcctcgatggtgatcgggtactggatcgccatatcttcgagcgacggatcctggaagatgacgaacggaggcaaatcatgctgccgcgccaccttcttccgcaaatccttgagcatcgagaacagctcctcgtcggccgcccctcctttacccgtaggagccaccgcatcggtctctttctcctcctcgtcgtagtcgtggtcgagagttatataaaccgggcggggtgcggcgatgaactcctctcctttggcattgatcgacagcaatccgtaattttcgatattcttatcgataaggcccataatcagcgcctgacggatcacggctccccaataacggatgtcatggtccgcaccggccccgaaccattcactcttgttgtgtccgtaactcttgatcaacgcggtattcttaccgaccagcacgctggccaggtagtccgccttgaatttgtcccccagatcgcgcaacgcctcgagcgccatgcgaagcgacgcctgggcgtcgatcttgggtttggggtggaggcagttgtcgcagcagccgcagttctcctcaggatattcttccccgaaatagtgcagcagcgtcttgcgacggcacatcgaactttcggcgtacgacacggtttcgagcagcagcagcttgccgatctcctgctcggccaccggcttgccctgcatgaacttctccagcttctgaatatccttataactataaaaggtaaggcagtgtccttcgccgccgtcgcgtcccgcacgccccgtctcctgataatatccctccagagacttgggaatatcgtaatggatcacatagcgcacgtcgggtttgtcgatacccatgccgaaagcgatcgtggccacgatcacatcggcccgctccatcaggaagtcgtcctgattggccgcacgtgtctgggcgtccataccggcgtgataggccaaagcccggatgccgttggctacgagcaactccgtaagctcctcgaccttcttgcggctcaggcagtagatgatgccgctcttgccctcgtgctgcttgatgtaacggataatctcccggtccacatcgtgcttgggccggatttcgtaatacaagttggggcggttgaacgacgacttgaataccgaagcgtcgctcatacccaggtttttctggatgtccatctgcaccttgggggtagccgtcgccgtcagggcgatcaggggcgccgtgccgatctcgttgatgatcggacgaatgcggcggtactccggacggaaatcatgcccccactccgaaatacagtgcgcctcgtcgatggcgtagaacgaaaccttgaccttgcgcagaaacgccacgttatcctctttggtgagcgactccggagcgaagtagagcagcttggtccgcccctccaacacatcgttgcgcacctgcgcgatggcactcttgttcagggaagagttcaggaagtgagcgattcccgcatcgttagaataggtgcgcatggcatccacctggtttttcatcagggcgatcaacggcgatatgacgatcgccacgccgtccatcagcagggcgggcaactggtaacacaaggacttgccgccgccggtaggcatcagcacgaacgtatcttttccactcaacacattgcgaatcacggcttcctgattccccttgaatgaagagaagccgaaatattctttcagtttctcgcgcagcaaggaatcttcattttgcttcataactcttctcaaacacaaatttcaatgtaaagataaaaataattcggaaaaaaacataactttgtaaaaaaatttcataaaaaatgcgtctttacaccagcgagctcgtcaagaaatacaaagcccgcaccgtggtgaaccacgtttcgatcgacgtgaaccagggtgagatcgtgggtcttctgggtccgaacggagccggcaagaccacgacgttctatatgatcgtcggcctgatcaaacccaacgaaggccagatctttctcgaagacgacaacggccaggtagccgaactcaccaaagagcccgtctatcgccgggcccagatgggtgtggggtatctggcgcaggaggcctcggttttccgccgtttgagcgtcgaggacaacatcaaggccgttctggagatgaccgatctgaaaaaggacgaacaggccgcacgctgcgaagcgctgatcgaagagttccgccttcagaaagtacgcaagagcctcggcatccagctgtcgggcggcgagcggcgacgtaccgaaatcgcccgcgccgtggcgatcaacccggccttcatcctgctcgacgaaccgttcgcaggcgtcgatccgatcgctgtcgaagacatccagagcatcgtcgctacgctgaagaacaagaatatcggcgtcatcatcaccgaccacaacgtcgatgaaacgctggccatcaccgaccgtacctacctgctgttcgagggtaaaatcctcaaggcgggttcggccgaggagctggctgccgacccgatggtgcgcaaggtctatctgggacagcatttcgaactgcggcgcagtccgacgctcgacaaactccgcaagggacaacccgcgagcgcagccgaagagaatccgtccgaggagaaatagaccgtacccgccttctgtcgggcaatgcccggcggatcggcctcgcggaatccgcccgactcctgcctacgacggtacgaacccggaccggaatccggaaccgttttccgcctgcggcaagcgcccctcccggcaagcccgggaagtccgaaacgaaatccggaaaggattgcggactcgcaaccgattccgggagcgcatcccggaaaaaacaaacagacaaccattttcgaacaccggtttgcatcgtacagttcgcgcgaatcattccggattcggaaaatggaaagcgaaacaacgactttttgacaagtgccgcaacggactaaactccgaactgccgcaccgaaaaatacagtaattatccgtatatggatcaatccgttcccccggggagggttcgaggcatttgcattcccccatgttccaaaagttacgcacagcgcgccctggccgcctcgctgctggccgaaggtacttcccggctgcataacatcgaattttgcgacgatacccgttcggccatccgctgcatcgaggcgctcggtgcccgggtacggcgcaccggagagcgcacgctcgaaatcgacggcggcctctcccccgcaggcgacaaactctacgtcggccagtcggggctttccacccggctcttcaccccgatcgcatccctctgcgacacgccgatcggagtggtgggcgaaggaccgctgctgcaccgctcgttccggacgatgatccgcacgctccgggcactgggcgtccgggttcacgaccgcaacgaccatcttcccctccatatccaaggcccgatccggggcggcgaggttcaggtagaggggctggtttcctcccagttcatcacaggactgctgctggccctgccgatcgccgaagaggagacgacgattcacgttccccacgtaatatcgaccccctatatcgacatcacgatcgacacggccgagcgcttcggcatcgaaatcctgcataaagactataaagaattctacgtggccggaggacaacgctaccggcctgccgagttcgaaatcgagagcgactggagcgcggccgccttcctgctggtggcgggggccgtcgcgggtgaagtgacgatccgcaacctctcggtactctcccgacaggccgacacagccgttatgactgccctcatacgggccggcgcatccgtcatcgacgagggcgacacgatcaccgtcgcacaccgtccgctgcaagccttctcattcgacgcgacccaatgtccggggcttttcccggccctggctgccctggccgcttcagccgaaggaacgagcgtcatcaagggaacctcccggctggagaacaaggagggcaaccgcgccgagtcgatccgcgaggagtacgccaaactcggcatcgaggtcgatctcgacgaagaggatacgatgaaaatccggggcggacgcatccggggcggacacgtgcacagccacgacgaccatcgcatcgccatgtcgctcgcggtagcggctctgaacgccgacacccccgtcgttatcgaaaatcccgcatgcgtggccaagagcttccccgacttcttcgaacggctcgaatccctgcgtactgtggaataaacggaccgactatgccgacacgccgggaaatcatcgcacggatcgaaacgccgctcaccgccctctacggcgagcgcgaagcgcggcaaatcgctcggatcgttgtgatggaactcggcggactctgcctgaccgacctggtcgccgaaccggacaaggagctcggaatcgacgaactcgaccggatcatcggcgaactggccgccggccgtcccctgcaatacgtactgggacataccgaattttacgggctcgatttccaggtgcgggaaggggtgctgatcccccgtcccgaaaccgaagagttggtccgctggatcgccgaatcccccgccccggacaatcccgccgtactcgacgtcggcaccggcagcggctgcatcgccgtcacactggcccggctgatcccggagtcccgtattacagccgtcgatatttccgaaaaagccctctccatcgcccgcgaaaatgcccggagactcgatgcagaagtggatttccgacaaggcgacgccctcggggagctattccccggacaacgggaacagttcgacctgatcgtttccaatcccccctatatcccccgcagcgaaaaagcctcgatacgcgtgaatgttacgggttacgaaccggcggaggcgctcttcgtcgaggacggagatccgctgattttctaccgggccatcgcccgcaatgcccggcggctgctccgtcccggcggacggctctatttcgagatccacgagaatttcgcggacgaaacgttccggatgctgacccgggaagggtttccggataccgccgtgcgccgcgacctgaacgacaaaaaccgcatgacatgcagcctgcaaagaagataaaacgcgacaaaacgcccgaacaggcttacgcggccttgatccggctctgtgcccggagcgaaaaatcctcgggcgacgccctgcggctgatgcagcgctggggcgtggagccttcggcccggcagggcgtgctgcaaaagctcctcgccgaccgattcatcgacgacaaccgctacgccgaagccttcgtgcgcgacaaaatccgactgagcggctggggcgcccgcaagatccgcacctcgctccggctcaaaggcatcgccgcagcgatcatcgatgaagctcttgcccgactggatccggcgaaccagtccgaacggctgcggacacagctcgaaaaaaagctccgactgacccgatacaaagatacttacgatttgaaaaccaaactgatccgctacggcctttcgctcggatacgactacgacgccgtactcgatgccgccggcgaattgatccaaacaaacgacgaaccatgcgacgacttctgatttccgcgctgctgctgtgcagcgctcccgtttcggcccagcacctcgccccggaagattacatctttcccctgcgagacgtggccgggctttactccgccaacttcggcgaaatgcgtcccaaccacttccattcgggcatagacatcaaaaccgacggcgtgacgggaaaacccgtactcgccacggccgacggctatatctcacgcatcgccgtcacgccgggcggctatggacgcgccatctacatcacccatcccaacggcacgacttccgtatatgggcacctctcgaagttccgcgacgacatcgaaaaatacgtacacgaggagcgttaccgcacccggcgaaacagcatcaatctctatccctcggccgaccggtttccgctcaaacagggcgagcagttcgcctggtcgggaaatacaggctcgtccgcaggcccgcacctgcatttcgagatccgcgactcccgcacgcagcggaccctcaacaccatttccagcggcgtgatccgcacccgcgacgacattccgccgcgcctggtgaaactctactacgtcgaggtggacagcgtgcgcggtgtcccggtgcacgcccggccccgccccgtcgagctggtcgaaaaaacgcccggacgctatgcgctcaaacaggaaggagcactctccgtcggcggccgaggttacttcatcctggaagcgaccgaccgcaaaaacgacgtatccaacacattcgggctctggcgcatacgcgaatttgcagacgaagatccgatcttcgagcttcgtatcgacggcttcgccttcgaccagacccgctactgcaacgccgtcacccactaccccatgcaggtcgcctcgcgcaacgaagtgatccgcctcacccgactcgacggctgcatcgacgatttctaccccgtcttgaaaaaccaggccctgctgactccttcggaaggccagagccagcagatccgcatcgaagccgaagacgacagcggcaaccgctcgatactcgaattccggacgatccgacagcctgcacagcgggattttcgcgccgtatgcgattcgacggctctcatcgtcgataaccgccggcccttctcgcatacagcaggagaggcatcggttcacatccccgccggcgtcttctacgaaccgctctttttcagtcagtcgagccgcccggcccaattcgccgccgcgccgtcggtcgccgtcctctctcccctctattcgatcctcgattacgacacgcctctgcatacggcggctacggttacgatccgggcatatgttcctcagaacttacaaccccacaccaccctgggtttcgtccgcaaagggaaggtttcctatgccggaggaaaatataaaaacggcgccgtcaccctttcgacccgcacattgggcgacttctgcgtggtggccgacaccgttccgccacgcatcgagccccgcttcaaagccggagagccgatcagaacgcgcagcatcaccttccgcctgcgagacaacttctccggcataggcagctatacggccacactcgacggggagtggatcctgctcgaacgcaatccgatgcagggcaccattacccacaccttcgacgactcccgcaccccgaaaggccggagctacacgctccaactgaccgtcacggacaactgtggcaacaaaaccgtctggaaacggacgataacccgataacaataccgatatttacatacttcagacactgcccgcaacattcagacggccgaccggaaaatcggccagagcttttttcagacaacgcactgccggattacacggctccgttcatcttcggtccttggcgaatcctctcacaagcccggcacaccatgacaacgaaagatccgctaaacagttattgtttagcggatctttcatcgtttttctcaagtgattccggagcggttcgaacgctcgacccacagcttagaaggctgttgctctatccaactgagctacggaaccaacgtttgcagcacataatcgcatagcgcagcaaaggtaatacaaaatcctcgcttatgcaagcaacacgacaagttttacctcttatccagcaaggtatcaaatagttaatacaacacaacggaaaaaatagttcgcacccaaaattccagcactttttccttttatctccgaaccgtacaccgacaaaacaacatttccgcacatcaaaatttcacacaattaatattctgaaaaacaacacactacaaacacccccctctttacacacaaaaacttttcacccaaattacaacgaatataattttcgatccggccgtcggccgttgcagaaaaactttgttttgtggaactttgcggtggcaataccccagagcgtgttgtgtattaggaaacattcactaactttgcagtgccgtccccgacggatggcgacatattgtttagtgaaagtgtttcgctaatccttgacgataaaatttggcgattttaaggaaacaaggataggcaatacagacactcatcaccgtgtatagctatatcggttctcgatatactattcggtgtggggtattgtttatttgtttccgggccacgccaaatgcctgtcgtcagataaacgaacgactccacacttgaactgcttatacatatatattagggatagtcatttaattccttcaatttgagttaaccagcagactttcccttatttttccgatcatactcatcgttttcaggccgaaaagcatataggtcgcattctcgcaactcggcagccgcgtactcatcgcgcgtgtctgatattcgttcgctctcatcctttataattcttaaaatcaatactattgaaaatagatttgtgattacaccaacgggctaatcgcttttgctcctttgtcggttcgatattgttttcgaaatctcgatatggttgggcaaagggacttactcccaatcgcttcagagcctcaatgcggaccaaactttcgtgtacatccccaattaaagcatagacaaaaattctatatggttttatgccgcgcttggacaactcctgcacaacctttgtcacagaatctaactgactgattctgtcgcatgcaaaccggacgtatcttatccacttaacccgcgatagcaagtcaagtatatatttatcggcacacgcccggcgagcatccaacccttgattaaaatcaacagatatgcccgtgcgaattatttcttcgatttgttccagcccgaaatccgacgccagtacattgttatccaataatatagcccgacgcttatcgccgaggaactcccggagcggggatgccggccggatggagccttccttgtgcggaacgatgcaccacgggcaaccgttcgggcaaccgcgtgttaggaatccgaaagcctcattcacactgtaaagcgaataatcaggacagatatgttcaatctcgtctggtaatgttattgtatagtccttataacctgttcccgcccgtacgatctcgcacgggtagtagtctgcacaatcagccgtgaaagtgaaaactttagacatatacactcgatcgtacctaccgaacatcggattggcgaactcaaccgaatccccgtgcgacttatgccaagccgaaagtttcatcaatgccaagttcggaaaatgatgaccatctacatctactaatcctatattcactctttgtagtattttcagtttttcctgttaaacttcctctcgaccagatcgcacaaatccaggtacatcgcatcggtattcttcgccttcaccctctcccggaacctggctatatccgacagccagcagccgcaacggacataaatgccgtcttgcaggttgaaaaagtaaaccttgctgccaatccgagagccgaacccgacaaaagccaggaaaggataatcgccgatatattcgcctttcccttcgaaggagcactcctcaccgaaaaagcaatcctcaccgaaagagcaccacttgccgaaggagcaccactcgccgaaggagcactcctcaccgaaagagcactcctcaccgaaagagcaatcctcaccgaaagagcactccttaccgaaagagcaccacttgccgaaagagcactcctcaccgaaagagcaatcctcaccgaaagagcaccacttgccgaaagagcactccttaccgaaagagcaccgctcgccgaaggagcaccgctcgccgaatatttgtatatcactgtaatcccccgaggggtattgtttgattccgtcgatcacctcgaaggcatcgaaatccgcttgtgtgtattctttcattttcgttaatctattaaattcaattcgatgattccgtctattttacaatcctcgatcccgatacactccaacagagccgggatgcgtacaagaggtttggccgggttgaagtcgtagcggcccgaaatccgaccgttgagagagctgatgatcctacacagcgacagcacgatgttgtaagacctttgaggagcctccaacaggatacagccgctgatggtccgatacgcctcgtccgtcttgtcgttgtactgccgggcggctcggtcgtcgatcttgcgaagcatcgaccacgcgacgccgtgagcctgcgagaccaaagtctgagcctgcgtatagcggcgtttggtttcatggtggaacaagccggatgccgtgagttcggactcaaggtcgagcatcgcgtagttcaagcagccgaccagcgtaagcatccgcaccgcgagcggcacgtaccgctcgtcttccggccgaggaccccgcgcgagcaagcgagtgttcatccaggccgtatgtttaatcaacattgcctggcggtaagaaaggttggtcatataatcaatgcgttttacccatagtgaaccactcggcagaatgaagccagtgataaaattgtcgttttgtcatttatccaaataattttgaactgccgttatagcttcattcagtgtgcgaacaagtacatacttgtttccaacctgttcaaaagatttctgccattgtttttgtgctggggtctgacgacttccttttacttgggtcttaaattccagtcccagtacaccaaacccatctcggggaacaagtaacagtaaatccgccgctccagccgtcatcccttcagctttcatgatggccgcctcggttttacttcgcaatccaccattgggcacgctcgtcaaattcaaagcatactcggggtattgaagccggaaccaacgtacaaaagcgcgttggatgttcgattcaaggtgtttcatttgcgtaaactgtttccattaaaagcgacccgatggcatagatacttgatccggtcgtatatccgatctccatatcggtccttgatcgcttcgcctgtaaggttcgaagatatgaacagaagcgtatcgggcttgtcctgtgccttgttgatgagttctacgaccagattacgtcgtgtcccgaactctactcggtccacctccacgcccatatcgtccagtgtgataaacttgcgtttaattacgtcgtcgatattgacactctgtgacccgcagtccacgaccgttacgatccggttggcgaacttgcgtagcaacatcggaattgcgtagcggaccaacagcgatttcccgcgtccgcagtttccgaacagtagtaacccttttccgttgtttgccgacagccattccgctaccttgtcgtattccggcaaccagacaaaccgttcgcccatagctcccagaactgcggacatcgcagtcaccaactcttctttcgcattcggaatactgaaggtgaaacgggcgcaaggcgtaggattaccttcgattttcaactgtttcaggatttcatcgtagttcattgtcagaagtcttcatacgtttggcccggttgggcgtgatagtccgttgccggatggcgatttgccgaattgtcctggtcatgtggagggaacagccccgaatagttgttggcgatcgagaagtccacgatacggcgagctttggccgcatcgttgcccgaaagcgtcagcaggcgtacatagcaacgctgtaatccgagcggtcgataggtctgtccgcgttcagacttgtaagcaagccaatccgccatgataggctggaacgcaggttcgacagccgagagatctatattacgcctggattttttcgggaaaaagtcgtttaaccacgtttggaaataaacatttttcgcaaattgagcgctgcgttgcaatttaacataatctataaccagtccctccgtctttttgcaaaagtccttgtagtcatcggtaagcgacttgcgctttcccttgaacttatcccacaacgtcacaaattcagtcggaatataatcttcttccccctcggggggatataaggggggattatttatatcttcgacgtaaggagaagatataatacttttctttacttcgcggcaaaattccggagtattcggcgattcttccggaagtttggctgtttcttccggaagaatgcggcaaaattccggtatttcaagattcttgcgtttcgctcgtatgcaagtgtcaatatatcgcctttggatggctgccgacgttatgatcccacgagagagcagttctttattgaaaagacccacaacaccgcagtaccgaacaatctccaaaacaaccgactcctttaacctgaggtattcagccacgttgaaggcagtactttcgtcccacgcagcaaaacagccttttacccggtatatattacatagcaagtagtcgtaaaccgcaataccgtcacaaccgaaagccttaacaagccgccttatccgaatatccaaatatctatccgtatcgacgctgtaatagcttaatccgaccctaatattggccatatcattgtattatttcggtggtttatcaaacacttcaatcatcttctttatttacaattttaagcgttctttctcgtaacttatcatagtccgaaggttgtcgcactgatgcttgcaagatgcattgatgcggtccaaccacttttctaaagcattcagctccgaagcagaactgttcaccaattttgtcgccaacgatggagacaaactgataatcgtttctttttcatcgtgaaacaacctggccaccgcagcgtcacgcattccgacaacctcactcaacaattcaccgctgcgagcgtagtaaacacccagctggtccaaacgctctatcatggcttcgatattgggattattcatacattcaagagccatctgaatattccgagcttccttccgtatttgttcgattctttgcatggcgtttaattatttttttatacaggattctacccatacggatagcatttagtcctcggatagtcgaggcatcgcaaaactccaggtcacgcagaatacgtactatttgccgaatctcccaagacttgatttcataaccgatcatgggattccgaatattagaatggaagatcatctaccctagctgccaaaggcatatccgcgatattctccactgtaaccggtgccgaagtgaagtttatggccttaccccggccgatataaacacgaggtgctttcgcctctctctcctctttagtctgacgcataaataccgaatgggtattttcgtaggaatccggttcccggaactgcgaaacgcatacggcgatatacttcttgccattattggcaactttgatctggtcgcggggaatatccgaaacgcaaatcgatacattgataagttgtgacatagctacggttgttttttgaatgttgttttgatactcgttttactacttcgaacgggcgggtaaagcatctcacccgtttcgggatcggcaagcccggaaacaggcagttgtcgaagcattgtttctcgctctttaatgtcagctttcaaggattcaagagttgcgtacatatcatataacttactgtcaccgcaatccgcataatcgtatttgacaccgacctcggcttcttccaaccggcaatccccgaattggtgcgatttcccgtattgggataattcgcggagtgtgatgtcccggatctcttcattatccttgaacgccttgattgccgcttccatcctgctgatattgatatgggccgttatcgggtcaatatccccgtttacgacagccctgaccgcccgagaggtcaattcactgaccgaggccgtttcacagagcaataatgaattattttccatgccgagccatcttataagaattgaacaaagccgcataacgtttaagcacgtcagtatcggcgtcataagatttcagaagacgtgcggcaatatcgaaatctgccgcatagcctgaagcggtccataagtcatacccccaattaagcagacaatcgcacttgatcggatcgtcaagcatatctgtcgtaatccgatgctttgtccggggcgtatcgggccgggccgaagcgagagggtccggagcagctgccgcgcattttgctgacatattgcgcgatttacccttgaatacatcggcaccaatcccgagccaggacccgatctttgtcaaagcatcggttgtagcccccttgtgggcatcacccaaatctgagttatcgttacctccataacattcataatagataccatattcaggtatctcgaacgttaccttgacaaccaccatcttattgtcacgggcaacctgttcggagcggacacgccagctacctactccgaatacgtcattcagacgctcggtaacgtagatcgctttgatcgtggacaggtagttctttgtcggatgcggcgatattgcctctgaaggcagcggccgatccagtaatcttttctgttcttcggatattttacgcagttccatattctcaatctctatcggttatcactcgtgatgcgaactttttagaatcgctataccgcatcatatatttggtttccttgcgtatctcggcagccgagagttgcctattccaagaacccgaggcaacaatgttttgcgggcggttgatttcgtaaatctcgattctcgttttcatgtcagctattttaacaattcattcagtttctccatcacccggggaacctcctcgtccgtggccgtacaccaggcgctcgctatgctcgtttcctcccgtatcgggacgtcgatccattccgtcattcccatcgaatgcaccgcgccctgccgctcggtttccaccgtatagcgtccctgcaccgcaacgccgtgatattctatctgaaagtcgaaagattccataggccctgcaactgtccttcgggtgatgtaatcggcgatgcgtttggcgaaagtccgaatctcctgatcggtcagatgaattgtcgtttgcggccggttgaaacgggtgctctcgaagaagtaatactcttccgagggttctttccgagtggacggcggcatttgagccgtgtcggtgacgtagtaggaagtattcatcgctgttcgaaaatttcattcaacagatagcgggtgatccgcatacgccggggaccggacagcgcccagccgaacaccaggcaaacaggaacggaaactactacgagtgtaattaagtgtgccatactcttaccgaatttcgacccgatagacacggggtcggttttggagtttatgtgcccggcggcgggacttgtcgattgtccggcgcaccttgctcttgaggcggtaccacgcacgccagaggcggcccgcaagcgtgccccacagacttttgactgtgctttcggaaaagaaggtttgcatgttggtaaagatttacttgtggatgatatttgctgttattctgctgcttcgacaaactcgccgcctttcagttgatagaaaacatcctccttgagcgatttcccatcgatctgtgcagaccttacgcacactggtttcagatcctcgccatattcagcgagggtaatccagctacctttctttgcctttatttttgaatctatacctatggctgctacaacagcattgttaccttcgctttcgatctttgcgaggtcgcccgaggagccgatctttgcgtcgtcgcccgaggagccgatctttgcgaggtcgcccgaggagccgatctgtgcgccgtcgcccgaggagccgatctttgcgccgtagcccgaggagccgatctttgcgccgtagcccgaggagccgatctttgcgaggtcgcccgaggagccgatctgtgcgaggtcgcccgaggagccgatctgtgcgaggtcgcccgaggagccgatctccagtataagtatcacctgtcaattcaatattagttctgccccaaaaacgaacaagatagatcaaatacacaatcaacgcgataatcacgaatagcaaaatataaatcccgatcataaacttcttttttacaaacctcggaactttcggcacaacttcaaaaaaatagcctcattattttgcgggggggggaattttgtaactttgcagcacctaacttaatattacattaatcatgaaaaaaattttattatggggaggggtacttggcataatattaagtatgacctcttgttacagcacacgggtcctgcatgggaatgtaaagcctaatgaacctttggtacaagtaaatcaagaatggaaccaccacttgattggaggattagtgccggtcggtaaaaataaactcgaagccgcagaatacgtgaacaatgcggaagatttcgtagtaaagactaatcataacttcctaaacctgttggtttcatgtataacatgcggtatttatacaccaacgcaaactaaattttatattccgctacgtgatgtacaaaatacagcacaagatggaaaaatcaaatcagacaaataaaaattcaccccggtcatagaccggggttttatgaataaaaataataaatagaatcaatcatcaaatacttttcgcacacttactgatcctttctgaaagatcaagcaaagcgcttcgtaaagtttctttttctgcttcgttaaaatcatccggtttgccattattcacaccatccattttatgataaagccacgaccgggatttgccgaagtaccgctccgatattttagcccacgatacatctaataaaatatcggacattttctgttttaccgtttttcggttttgtttcactaaaatttccatacgatctatttttatacctccggccaattggtcggaggtgattgtttaatctctgtctaataattcttgcaaaatcatctcaatataccattcttgttcctcctttccattgggatatgccttatggtaattacgaatagattctatcaaatcccactctttttctgttagctctacttccatatcatatttcgtgtttggtattacaaatataatacacttttgcgtattatacaaatatttctacatcattttttcattccgattgaaaaatgtatatttgtatcgtcaaatctatatgcaatataaatatgtctgtagtatcagatattttgtatctattacatacagttaaatttaactgcgtcgagttcggtaagcggaaacgcccgacggcttgcatatagggccggacaactcgtaacgcagttttttatttgtcaaacctatatgaaaaagcacatcgaacgtatgagccgcatcgaagcggcaattaaccccatgtactgcgtccccaagcgcagcgacctatcgttaatcgggtcggctttcgaggccgcaggtttccgttgtgtccggatccgcaccgaatgcgaggccgagcaccgcaccaaaggtggtgatccccgtcggcacgggatgctgattcttgatggcgaccgcgtgattctcgaaatcagccgaagtaaaaaagcagagtgtaagacggcgggatccgccgtataaggttattcgaagttacaaagagaaaggatcgaggcagaaacctcgatcctttctaaattttacacataatctactatgtatgttgtgcctatcggtattgaatataatttgtaatttaaatgctatatttgtacttaagaatacaacccaccgaaaagaatacttacgaaatacgacgccatctgaacaatgacaatacacctcacctgttggattcgccaaagttttccaaggccatgaaatagaccctctctttcgactgtattatatttatactccaatgatctcgttcaccatcactaacaaacatcgtccgacagccaccattgtcatgcttgtcagtttctacggtaagcagtaccgcaaaagtatcggcatcggactccctaccctctattggaatgagaagaagaaatgcgcacgcactacggccgactttcatggagaacctattaatgacgctatcgatcgctggagagaaatcggcaagcaagctgttaaacactttactactctccgtcaagttccaagttccgccgaatttgctattaagctcaacgaattgagtaatctaccagatgatgatataccaaacatagcagtctttttctgtgattaccttgagcatacttatatcccacgatatcacctcgtacgtcgagcgcacacggtaaagaaataccatacagcactacacaaactcaaggaatacgaaacccatactcaccatcgtctaaaattttcggacattggaattgacttctataataactttcagcattggttctttacatgcggattttcagcaaattattttggaaatattatcaaaataatcaaacaggtattccgcgaatctcgtacccatgacaagatccatacttttgacggcacagatcaccgtgacttcattgcccccaaagaagctgcggatacagtatatttgaatgaagaagagctacaaattattcgtcgcctggatatttgttcgagcatcgcaaatgatacgacacatcctttaagcgaagaaaatgccctccgaaaggtaagagcactggaacgagcacgcaacttgttcttaatcggctgttacactggcttgcgcgtttctgacttttcccgtcttcgggaggcacatgtaggacgtcatatttcgatcaaaaccaccaaaacaggggcaaatattgttatcccgatccatcctgtcgttcgtgaaataatagaaaaaggcttcgacctatcgacttctatcagtgatcaaaaactcaatgaccacataaaagaactctgtcgacttgcaggatttactgaagaaattatggtcaataaaaatattggagggaagaatatggaacttatcgtcccaaaatataaacttatttcatcacatacagctcgccgctcttttgcgactaacgcttataaagccggcgttccgactatcgcaatcatgaagattaccggacacaccaaagaaagtacctttctcaagtacatccgcgtttcagcggaagagaatgccgaactcctcagtcagcacccatttttcatgctccattaaggcataaaaaaacaaaaagtacaacatttaatacaaccacgactgcaatacactgacaaccaatgtcgttttgtggaggtggcgggagtcgaacccgcgtccaaacaaggaacccgaaagctttctacacgcttatccgccgtttcgtccttctatccgggtctggcaggcggcaacctaacccggatcccagttcctgaattttcgcacgacagccggaaccctccgccgtactatctctaaatgatcgataccccgtatggaaaaccgttaaagagcggaacggccttccgggatactcgtcgtcgaaccgccttggatccaacgattaagccaattttccttgaaaattaggcagcgagtgcatagctattattgccatttgtagttcgagtgttgatatttacgagccaccacacaatgctcgacgtgcttacaatcaaactctgcctgctgtcaaaaccggtcacccccttcgtagggatagaatttcattgaagtgagtacaaagatacgaaaaaccgggcagaaagccaaatttatcggaactttaccaaaatgtcctcgtcactattgaaagttttatacggaaccaatcaatcgccatataccatataaagttggaatatagcacaaccaatcagaatgatagctgtaattaaatgccaataactgggataaatcttttctatttcattattaggatctgttttgttcatcttcagacccgtaatgaaccaaagtaaactaagacttccaataagaaaaaagaaaaaaaccattcttcgattatattaaccaacgaattatatattggtattaagcaaagggcctaacaatcatacaatatatagcacaagcataaaaaaatagccacaaacagatgcaaaaaattcggataaaacttttccgtttcatctttgaactctgcttttttttgccttaaacgcaaaataaaaaaaagcaaactaatactcccaaaaaaaatacataaaaaagccattgctactgtcaatgatgttccaccacctaatgcagacattacctgcacgtatcgatataacaccgaaaattcgtctgcttattttccaaaggccccacctctgccttgtgcgcatccaacataaaaattcacccgatcggcattgcatacaagaatattttcacgtaccatgcctgcggaaccgctaccgtttcagatgcttacgcagcttctttttcagaacatcccccgttaatggtttggcaatataatcatcgcacccgacatcgagcgctttcgcacggtcgctgtcgtatgcatatgctgtgacggcaatgatgggaacggaacttcccgcctcccgaatctgccgcgtagcttccaaaccatccataacgggcatcttcatatccatcaacaccacatccggagcgaactcccggcacatgcgcaccgcttccgctccgttatgggcccgaagcacttcataccctttcttaagaatcagcgacaccagcagaaaattgctgtcggtatcttcggcaacgagaacgacgggcattttcccctccgaaacgcctggttgccgcatctccgcatcggaagcaaccgccgacacagaccgggtccggatgtaaggatgcgtaaaccaaaaacaagaaccctttcccggttcggagttcaggccgatacgaccgcccatctgttcgacgatactcttgctgatggccagtcccaacccggtcccctggacaaaactgttgagtttcacgaaacgctcgaagacagactcctgctcctgctcgggaatcccggtaccggtgtcttcgacataaaaggtaagcatcatcccgtcatcgcaccggtagcctaatgtcacagacccttcacgagtgaatttcaacgcattattaataaaattaatcaacacctgcgtaatccgggtcttgtcgcctaccaaccgacattcgggcagatgatcgccgaaacgcaactccaccggtttatccaggaccttgaggctcaacgaccgtacaatctcctgacacatctgattcacatcgaattccacatcgttgaattcgagcgttccggcttcgatcttcgacaaatcgagaatgtcggaaatcagcttcaacaacaattcgttattttcctgaacaatggctacatactcccgtcgttcgtcgggatcttcggtttcagcgatcagattcgaaaagccgacgatggcattcagtggcgtgcggatttcatggctcatattagccagaaaagccgatttcagacgatcgctcacttcggctttgttcttcgcttcgatcaaattcttctccgtttccttcaactcggtaatgtcgtaattgacacacaccatttcgatcttcgaaggatcgttattcaggggattgcgcatcacattgatacgggtccacttctgtcgtccgtccgcatcgatccgaagatcatggctgaaactgtcgatctcgccggctttcacctgtcggatggactccagaacttcagcccggtcggaggaattgacatgtttatacacaccgaggatctgatcgagcggcgtatcctccttctcgcccaggttataataccactgcggcacgccatacccctctttcgaaaccaggtcgaagcgacagtatccgaccttgccgaaacgactgaccagcgaaaacgagctttcgaactccgcgatacgactatgcgcccgattgatttccgtattgtcgatattgatcaggaagaaattgctcaaccgcccctgcgcatcgtaaagcatacacaccgaactgtatatttcgaggcggccctgcttggaggtaacataataaccgttcaaacgatcgaagggataatacgccttgaacgagaactcctcccggttccgcacccggcgccagacctcctcgtcgagaatgggattcttgaaaaaatcgaccccgagcacatcctccttgtcccgaatcccgaaaatctccagatccttgttattcagatcgacgagcaagccgttcctgtcgtacagttcgataccgacgggaatattgtcataaatattacgcaatagcttttcactgcggtcgagcgcctcgtgcgtttcatacatttcggtcatatccgaaagcaggcaaatcacctcctcgggagtggtcgaatacataacgacatgaacataccggccggaagccaacaaacggacctccttttcgacatgctgctccacctgcaatactttggcgaaaactttcaggtactcgggcatatcttcgatctccagctcgctcgccagccgccccacatagtcggcttgggattttccgataatcttttccgcagcataattcgaatcgagcaccttgtaatcgaccggcgtccccgtcttgtcgtaaatcatccggaaacggacataccccagcggcatgtaccggtagaggttttgcaaataatcgcgttcgatttgcgcctcccgcttcgaacgctgcaattcgatacagatattgatgatattgaccagtgatgcgaaccattggtaatcctcgttctgccaatcgcggtgctccccgatcacatcgattcccgcatacccccaaagtttatcacgaaatgtcatcggcagcacaaacagcgaaccgatattttgtgcagccagaatatcatgctcgttccttgcccgggaaggaaggtcgtccaaacaggaaagagcaataggactccttttttcgagctgctcgacccaccagggggtttcgtccatcgaaagtcgatcgaaccgatcccggccgctctccacgcccttgtccgtcacttcgtacgtataaatatgcctgcggttatcccagtcgaactccgcgatataggtccggctgccacgaaatatcttgaggacatcggtcagaaccttgttgatcgcctcgtcgatggaaccgatatgaaggaaagaaagcagcgtatgcgaaatattgttcaaccgataaagaagcgtattcatccgctcgatcgagcaaagatcgaccggcaaagcctccctttcgctgatttcctgggcatatcccgaaacaaccagccccttgtcggctgccgtttcccggcgcaggaccttccagcggaaccacacctcaccccggggaccacacagcgaaaaaatctgctcggcggagaacaggctcgcatccgtggacatcaggcttttgagcgaagcccggaacggctctccgaccgactgcagaaaacggtcgtaaccgatctcggactcctcagttcctatcgtcttacagagataatcggacaacaaaagaacccgtcgggccatatctactttccaccacccgatcttcgtatcccacaatatctcctgcaacatggattcacttcccattatccccttattgtcaatttataccataattaataacaaaaatactattcattaccgggagttccaaaaaaaatacggattattgtccggcacgatgaccgaaacagactatttttcggacattttcattacctttgtggaaggtaggatatgatcggtgtaaaaaacagaagagtttgttttattctgccttcattttcattacctttgctcccgtccgaatcggagtgcgacggcacgaaacgaagaacattcgtcctgcatcggccgatcggcacacacggacaccacgaacctttcaaccaactcgactcatgggcgaacaaaacgtaatccggctgcgcggcgtaacgatataccacacggacgatcctttcggcagccgctccgaaaaaaagttgctgcaacagggagaactgatcttgtccgatctgaatttcgacatcaacgccggtgaattcgtctatctgatcgggcgtgtgggaagcggtaaaagctccttactcaaaactttatatgccgagcttcaactcattgaaggcgaaggatacgtcgcaggcttcgacttgcgaaaactcaaacgacgggagattccgatgctgcgacgtagaatcggcatcgtcttccaggactaccaactgctcaccgaccggaacgtcttcatgaacctatactatgtaatgaaggcaacgggatggaaaaacgaatcagaaatccgcaagcggatcgacgaggtactcaaggtcgtatcgctggaagccaaaggctacaagatgccgttcgagctttccggcggcgaacagcagcgtctggtcatcgcccgcgccctgctgaaccgtccccgcctgcttttggccgacgaacctaccggcaacctcgatccgctgacggccgaaggcatcattcggctgttccaggaaatcgctcgtcaaggttgcgccgtagtcatgtccacgcacaacacggccctcatcgaagaatatccgtcccgcacgatcctcttctcgaaaggcaagatcaaggaggttccggtacaaacgatgctgcaggatatttaacgaatgcccgcacaaacggaaaccctgcgacctaagtttcatcgttgccaggtacagataattccgaataaaaacaggtttgggttatgagactccgtactcttttccggttgttcctgttattggcggcagtggccccaataaccacggcaaaagccgacagtcttatcatcggcacagatacgctcagactggacttacattggttggacgacactccgctggacgagttggcccgcaacgaccgggtattcgaaaaaaaattccaggcacttattcatcagcctaccgcagagggattcgttatctacatagacggtgatcacgaacaccattcctactggcgactgatcgacgacaaactctacctggatcacacgatacgcaaatcagactactccgaaatagatttcagcggcattttcgtccgcgaccataccggttattatccggccaccttctattcaggcacacttcctatatcaggcatattctaccaggacggaacgaaacccatattcgttttcgaggaggggcgattgacctatacgaattggacatatccttcctttccctgcccctctccgatgctgggcgatccgctgtttctgcacttcgactacatgcaattcgcacaattcacggacgggctgtggacctgttggatgcgtatcctcccggatccatccggaaaccccattaccatacagcccttgatagtagctcataaaagcggaatcatcgatgcttcggatgccgctaaaaaaagactgaaaactgcaatcgccgacagtctgaaaacagtagatttcatttgcgacgtaaatttttcccggggcagcatacaggccgttctcaaaacattcgaaattccccggccgatattataccgcaaagaaatcaggaaaaacggccgacggttggtcggatatgaaaatgcgaccggacgtccaatcgtccctttcgggaaatacgcccgatgccacacacccatcataagtgaaaacagaatcgggatcgtggaaacagacgaaggaaagtttatagccatagaccatacgggtaaaaagctgttcgaaatcatgtttcagtccccggtactttcggtcgaagatttattccggtacggttatttcatctatgtcacccgaaacggccgacagggagtcgccaccatcagcggattgcgatacacgcaaccgacccacaagccgatcgatctctccgacgtcgatcgggatgttatcaaagctcttatccactgatccggctacgcttccggtatccgatatttcgcccgaataagcaccccgcaaatccggctgcggcaaaaatcaatggcaaaggggtgcttgattattgcatcttacgaaacttttccgtatatttgtacgatatatttaaggtcaatatgagtactgaaggaaaagagataaagaagcaggaagaggagtattccgcctccaacatccaggtcctcgaaggtctggaagcggtccggaagcgtccggccatgtatatcggcgacatcggagaaaaaggtttgcaccacctggtttacgaggtggtggataactcgatcgacgaggcgttggcaggacactgtaccgacatcgacgttacgatcaacgaagacaactcgatcacagtcaaggataacggccgaggcatcccgaccgacttccacgaaaaagagggcaagtccgcactcgaagtcgtgctcaccgtgctccatgcgggcggcaagttcgacaagggcagctacaaggtttcgggcggtctgcacggcgtgggtgtttcgtgcgtgaacgcactctcgacgctgctcatcgccgaaatccaccgcgacggcaaaatattccgccaatcgtacagcaaaggcgctccgacttcgccggtcgaagtgatcggcacctgcgatgatcgcggaaccacgatcaccttcaaacccgacggcagtatcttcacgctcacgacggaatacaagtacgacatcctggccaaccgcctgcgtgagttggcattcctgaacaaaggcatccacctgaacctgctggacaaacgccagcgggacgagaacggcgaatacgtcggcgaccatttctattcggaagagggcctcaaggagttcgtcgaatacctggacgccacgcgcggtcaggccatcaccgaatcgatcatctacatcgacaccgaaaagaacggcgtgccggtcgaggtggccatgcagtacaacgactccttctcggagaacgtacactcctacgtcaataatatcaacacgatcgagggcggtacgcacctgacgggtttccgccgcgccctgacccgcacgctcaagaaatacgccgaggattcaggcatgctcgccaaactcaagttcgatatcaacggcgacgacttccgcgagggtctgacggccgtagtttcggtcaaggtcgcagaaccgcagttcgaagggcagaccaagaccaaactgggcaacgacgaggtgtcggcagcggtcgatcaggcgatgtcgacggccttgagtcactacctggaggagaatccgcgcgacgccaaagccatcgtacagaaagtcatcctggctgcaacggcccggcacgcggcgcgccatgcccgcgaaatggtgcagcgcaagaccgtgctttcgggtgcgggccttccgggcaagttggcggactgttcgagccgcgaccgttcgatcgccgaaatcttcttcgtcgagggcgactcggcaggcggtacggccaagcagggccgcgaccggaacttccaggcgatcatgccgctgcgcggtaagatcctgaatatcgaaaaagcccaggagcatcgcatgtgggagaacgaggagatcaagaacatgttcacggcactcggcgtgacgatcggcacggaggaggacagcaaggcgctcaacctcgaaaaactccgctacgacaagatcatcatcatgaccgatgccgatgtcgatggcagccacatcgccacgctgatgcttaccttcttcttccgcaagatgaaagagctgatcgaaaacgggcacgtctatatcgccaccccgcccctgttcctcgtgaaaaagggccagcaggagcgctattgctggacggagaaggagcgtgacgagatcacggccgaaatgggcaagggcgtacacgtccagcgctacaaaggtctcggtgaaatgaactcccatcagttgtgggaaaccacgatgaacccggacacccggattctgcgcaaagtaaccatcgacaacgctgccgaagccgaccgcgtattctcgatgctgatgggcgacgaggttcccccgcgacgcgagttcatcgaaaaacacgctcactacgccaatatcgacgcataatcgaaaattacaaaggattgcaccccgcaggggagcaatccttttccatatccgtttggcaggcgggagctaccctttcgttcgattgcgacggaaagctgacccgatgcgttcatcggaaaggacgaagttggcagcacactcggagttcggccatacggcaaacgggaaatgagaaaacgaaacataccgtttttttgacgtaatttatccgaaatccgacggcggggaaaaagaaaaaacagattccgggacgcttcatcggacagatgaaatcggaaatacctaccgacttcgtgcgggtgcaaatacgggaaaaaatcacaccgttttcggagaaaaaccggtcaggcggttatcgcacgcagaaaacggagaataaaaaagaaccacaaatcgggaattatgaatgtgacagtcatcggtgtcgcaggcggcacaggatcgggtaaaagcacgctggtaaaacgattgcaggaggctttcaaggaggaagaggtagtcacgctctgccacgactactactacaaagcccatcccgaactgacgtacgaagagcgcacgaaactcaattacgaccaccctcaatcgttcgatacagatatgctcgtcgaacacatccgcacgctgaaaaacaacgttccgatcgaacatccggtctattcgttcgtcgatcacaaccgaacggccgaaaccgtgctggtcaaaccttcgaaggtaatcatcgtcgatggtattctgatcttcgagaacaaggaactccgggacctgatggacatcaaggtatatgtcgatacggacgccgacatccgcctcgcccgccgcatcctgcgcgacgtatgcgagcgggggcgcaccatgcagtcggtcatctcgcaatataccacgacagtcaagcccatgcacgaggagttcgtcgagccgtcgaagaaatacgccgacgtaatcatcccggagggaggtttcaattccgttgccgtaagcatgttgatccgcagcatccagtcgcagatcaacgccaaataggagcacgcgaatccattccccgaaaatcgattttcgcaacaggcagtctgtgtaactcgcctcgacacgcagtccattacgacaaaaaggaaccgtccgacaactccccgaatttgaaaatcacccctgccaagaatgtcttccggcaggggtgaaaacgttagaatcggacttgtcagatactctcttccatttattccccccggcgcaaggcaaacggatactttttccccttcacttcggcgattcctcgctccacgtaagcggtagcggccgaatcccactccgaaaagatcgttatgtcatcgtattcgaacggtacgataacacgtccgcgaccgtccaatactccgaatcgaagcaacccggtagaatcgggaacacctgcggaagcatgcccgaattttccgctcgggttcacctgatagaccttatagtcgatcaacggtttgccggaaacatcgagcagggtacaggcccgggaagcgaaatcctccccttctccgacccaggtcgttccgaacggcgtgggctgcacccaatcgtaaatacaaggtaggatttcccgtccattccggtcgatactgccgtacttcaaagcaccgccggaaacaatgcagacgaccgcacggccatttcggaacgaagaaacctcgtaatacttgcatgggatgaccaacgtccctgcggcatcgacaaatccccagcgtacataatatttccccatctgtccgacagcggccagcacttcggaaaaatcggccgcaccgtcgtatatcggagcaatcacttcgttaccccgacgatcgatgaatccgtatttcccggtaaattcaaaatccctttttccatagccggacttaccgctccattcgcctttggctacgactgccattccttcggaaaaatcccgggcataatcgtatttcaatggaattacgacctgtcccagcgtatcgacatacccatagcggcggacggaatccgtcccctcctgtacccgggcaaggcctgacgaaaaacccgcgacatccgcatagatacagggcacgacttcacgcccctgacgatcgataagcccgaaacgacgatcgttcttttcccctttgccgaccacggcaaacccattggaaaaactatcggcatagtcatagatgagcgggaagaccaccgtaccgcaggtgtccgtataaccgaaacagccgtccgtataaaaacggcccatacggggattgctaccctctccgccccggtgtacgagaatacgtccgtcatgcactgcacccacataatcgtatttcgttttccaatcttttttagcggctgcacggcgttgtgccgacaccccggccggaaacagggaaagaagcagtacaactataaagtatcgctttatcataatccagttatctttttgatttcatttaatttattaagcgcctcgatcggagtgagagcattgatgtccaaccccttgatctgatctcggatctgcaccagcactggatcgtcgagttggaacatcgaaagctgcataccccgcgtctgatcccccgcttccgccgcctcgcgaactccggggagcgcttttcggtcgcggcgtcgagggctcttgctgggcacgatctcgttgttgccatataccagctccagattcttcaggatctcttcggcgcgggctacgaccgaggccggcattccggccatccgggcaacgtgaataccgaacgaatgctccgttccgccccgctccagcttgcgcaggaagacgatcgtcttatccacctccttgacgctcacgtggtagttcttcacacgcgggcacatctgctccatctcgttgagttcgtggtagtgggtcgcaaaaagcgtcttggcacgggccgtcggatggttgtgcaggtattcgaccatcgcccaggcgatcgaaataccgtcgtaggtactcgtaccgcgtccgatttcgtccaacaggacgatgctgcggtcggaaacattgttcaggatgctggccgactcgagcatctcgaccatgaaggtcgattcgccctgcgaaatgttgtcggaagccccgactcgggtgaaaatcttgtccaccacgccgatatgagccgctttcgccggaacgaacgaccccatctgggccatcaggataatgagggccgtctgccgcagcaaagccgacttacccgacatgttgggacccgtaatcatcacgatctgctgctccttatcgtccagcagcaggtcgttggggatatactcctcccctaccggcatcagggtttcgatcaccggatgccgtccctggcggatttcgatgcgcgtaccgtcgtcgagcgtcggacggacgtagttgcgctcccgagcgatacgggcgaaagattgcaggcagtcgatacgcgccacgacagcggcatcccgctgcaaagctcccagggaatgcgtaatgaacccgatcaattcggcgtaaatccgctgctcgatcaacagcatcttctcctcggcaccgagaattttttcttcgtactctttcagctcttcggtgatataccgctcggcattggccagcgtctgcttgcggatccacgactcgggaaccttgtccttgtgcgtgttgcggacttcgatataataaccgaagacattgttgtagcttattttcagcggaattcccgtcgcctcgctctcccgctgctgaatacggttcagaaaatccttgccatgcagagcgatgcggcgcagatcgtccagttcggcgtccacgccgtcggcgataatgccgccccgctgaatctgattgttctgcgggtcggggtaaacctcgcgggcgatacgctcccgaacctccgccagcaaatcgatctgtccggccaacgcgtgaagacgctcgtcgtcggtcgattccaacaaggctttgaggagttcgatcgccgaaagcgaatttttaagctgtacgatttcgcggggggttacccgagccgccgctatgcgcgaagcgatgcgctccaggtcgccgacctgcgaaatctgctcggcgacgctttcggccaaatcgggctcgtcgtaaaaccgctgcacgacatccagacgttcgttgatgcgatcaatctccttgatcggcaaggcgatccaccgcttgagcagacgcccgcccatcggcgtgagggtgcgatcgaccacgtctgcgaacgcgcacttctcgcgcgaaccgttcgaagagaagagctccaggttgcggatcgtgaatttatcgacccaaacgtaatcctcctggtcgatacgcgaaatggacgaaatatgggccgtattcttatgttcggtaaattcgaggtagtagagaatggcccctgccgccgaaatgccgctgctgaactgttcgataccaaagcccttgagcgactgagtgccgaactgcttgcagagcttgtcccggttgaccgactccgaaaagacccactcatcgagccgataggtatagtgccgactgccgaacgcatcggagaagcggtcttcgtatccgcgctggtagatgatttccttcggcgccaggttggaaatgagtttgtcgatgtaagcatcgctgccctcggcggcataaaattcgccggttgaaatatcgagaaaagccacgccggtatttttccggccgaaatagaccgccgccagataggtattttccttgttggccaaaatattatctcccagcaccacgcccggcgtaaccagctcgatgacgccccgcttgaccagccctttgacctgtttgggatcctcgagctgttcgcagatcgccacgcgttcgcccgctcggaccagcttgggtaggtaggtgtcgatcgcatgatagggaaaccctgccagttcgacgaatgtcgcggctccgttggcacgtcgcgtcagggtgatgcccagaattccgctggccttgatcgcatcatcgccgaaagtttcgtaaaaatcgccgacacgaaacaggagaatcgcatcgggatgcaccgctttgaccgcataatattgcttcatcagcggagtttcaacatattttttttctattgccattacctttcaagataaagtcggaaacatcggagtaaaccctaaaaatccggcggcggacgacttcgctcatgccggtccacaggattgctccacgtcctgcaaatatacgaaaaatccggagcaaaaggacttcaaaataacgaatattgaaagaatattgcattcattcataattcatataatctgcaataaatgggtgtacgacaatatagtacacccttaccggaatcggccccgcagtcgatcaacggtgtcgaaccgtggcgttatcgaccgatgtcgagataaccacaggttcgcccgaatagttgaattcgctcataccgctcacacaatatttcagcgatcccgccgctgcgaccgaggcggtactcataccggaaatgtcacagtcggcaagtcccgaagccaaaaactttctccctttgaactgactcatgcccgacacttccagcatcaggttccgagctgttcccgaaaaggtacattcgctcgaaccatccactgcgacctcggctttctgcctgcaattcacatttccattataaacggacataccggtcagcgtacaatccaaatcccggcacataaaatccgcgaccgcctggctcattccagatgcctccaccgtcgctgtatcctcgcataccacctgccctttgtaaatcgacatacccgacacagacatcgtcaggcttctgcaacgaatatcggattcgaactcgctcattcccatacattcgaccgtaaccgacggtttatcgatcccggtctcggaaaaaacggaggacatccccgacaacgaaaatgactccagcggagcggcgcccacatacactacgacccgcttggacatatcgttctttctcttggacgacaaggctccggggtcgcacgcaagcacgagttcaccgcgccgcacccgcacggaaaccgcctcagcaggcacattttcggtttcgacccggaccgaagcgggatttcggtcggcttcgagtacgacctgaatcatattactcacattcaacccgaaataaggtttgtccagcacgatttcggcatctgtccgaaaatacacccctcgatttttcttttttgcgtcacacacgccgatccccaacgccaagcagagcaaaagcagagttaattttctcataacggtcataaattatagatttaactctataaagttaaagaaaaattcggggaaaccaacgttttccccgaaaaaactcacagcggaacagatcgccgcagtacgatttcatccaaccggcaattcgatcagagcatcccgcacacggcgaacatccgccggtaatagtccgccttccactccaccggtttcggataggcccgcgacgaagagggcatacgataaagccgaagcgtacggtccgcataggcgaactccacactctctcccacaggcggctcggcacaaccggcaaggcgcacgattacatcggtagccttctgtcccgtcgtcacgatcgcccggcaggtcggaaccgcagccaacaactgcgccagatcgacctcgcgcactacttgaagaaaattgtcggaagcattgtttttcaatcggattatctcttcggccgtatcgtaaagagccaatcctttctcctcgcagaaacgcacgatccgttccttgtcgaaacgtttcgcgtcgggtgtcagaaaataccccttgtccccgaaaaataccagtccgacgatacgccacatatcgttctgcaagttcgggtaaaaaaagtccatcgaccaccgcacccgctgcggcgggaaacttccgagcatcagcagacgtgccccgacaggcagaaaaggttcgagaggatgcagttcgcttgtcataatttttaatttatcgtattatttatttccaaatgatcctgtttcaacccctattttggggcgctgtgcaagagactcactcttcgcccggcatcaccggcaatccgatccggcccatgcagaatcgcgggaacaacgcctccgcaaccgacagccgcccaccacccgacctcgcagatacttggcgatcgcacgcatccggaaatgctgcggatgcaaagccccgctcgcaacctccgaacgaaggtcattcgtaaaaccgttcatcgaaattcaccagatagagtttgtcggtcgcacgggtcagcgccgtatagagccagcgcagcatgtcgcgcgtcatcggctcgtcgccgaacagacagcggtcgatgaaaaccgcccgccactgaccaccctgcgccttgtggcaggtgacggcgtaggcgaacttcacctgaacggcattaaagtgcggattctcacgaatttctttgaatcgcttgagcttgctcttgatatcgagataatccttttccacctcgcaaaagagccggttgctctcctcacgggtcagcgacggggactccgaggcaatggtatcgagcaggatcttgcactccagctcggcgtcgttgtagtccgcgaacgaaagcacggccgtagcgaagcggaagccgtaaaaatcctcgaaacgcctcaggcgacgcagttcggctatatcgccgttggccaggaaattcatagggcaatcttcggtgcgttccgtaaaatggtagttgttcttgacgaccatcagcagatcgccgctctcgatctcctcctcggcgcccagcacgtaacggcgaataccgtcgttgtagcggttcgcccgtttgttggaacgggtgatgacgatggtttcgtcgcgtccgtaacggtcgtagcaatcctgtaacttctccatgaactcaccgccttcgaccgcctcgatatcgggaaaatccattcgaaaacgcggtacttcacagataccgttctccaacatgcagcgtaccagggtagcattgaacagaatacccgattcggcctcctgacgcaccacttcatccagcgacgtgtaaatcacctctccatagacggacagggctttcggatcgagtgccggggagtaatccgccccgatcggaggaagctgcgcatcgtcgcccacgaggatcaaccggcagtccctgccgccgcgcacgtaactcaccagatcgtcgagcaatgctccgctgccgaagatcgccccgtccgaagaaccgtttgccagcatcgaagcctcgtccacaatgaatacggcaccccgttcctggttgatgttgagcgaaaatttcgactcgtagtcggcattggtgcgctggcggtagatccgcttgtgaatggtcagggccggttctcccgaataacgggacaacaccttggccgcccgtcccgtcggagccagcaacacgggtttgatgccgcaatccttgagtgccccgaccagagcggcgatcaacgtcgtctttccggtacccgcgtaaccgttcagcacaaaaatggctacaggatcgctctcggccaaatactccgaaagcgattcgatgatttttttttgaccagatgttgtattaaaacaaattttagcgtaaatttgggtcgcaatatgagtctttagcatcttcggatcggtaaaggacggcggtattgccgacggattttgatacaaacttactagaaataacttaaaaatgacaaaaagaatcatccaaatcgtacttgccgtagttatcgtatgcctgatatacgttatctacaaacagatttcgactccgattatcttcgccaaggagaaggcggcccgcgaagcacgcgtcatcgaccgcatcaaggacatccgtactgcggagcgcagcttcaaaacgaagtacaaccggttcaccggcgatttcgacacgctgatcaattttgtgctgaccgactcgctggagttcgagcgcaagatcgtcgatgaggatgactcggtggcaatggcccagttgaaaaagagcggccgcaagaacagcgaaaaggtatgggtacacgtgatcgacacgatcttcacgccgaaaaagctcaccgcagaacaggttcgcaacctgcgttacgtgcccggcacgaacaaccagacggaattcgaattggaagcaggtcttgtgaccaccgaatcgaaagtggtcatccccgtcgtagagtgccgcataccttataaaatgttcctcgacacggtacgcttccgtcaggaggtaatcaacctggtggacgatcaggagaataacttcagcaactacggaggcatcaagttcggctccatggagaaaggtaacaatgaagcaggtaactggggcgacgaataacaagcccgaaatcaagaatgtgtccatccggctcaggctggatggacactctttttctgaagagaagctcgacataccggccaaagagaaaaaaacggtcgaaatagaggtattgacgggcaaaaccatgctggttccccgggaagtgttcgacgcgaaggccgctcccgccctgatgcgtataaacggaatggaaccgacggagaaggagtgtattctcacctccgatccgcaacagcccgtcatcgctttgatggctgccgacaaagcctccgtagagaaagtccgtgcccggctgaaggagaagatacgctggacctccccgttgctacgtaccggggaattcacggcatcctgcctctggatattccgttatgaagagttggcctacctgaaagtatgggaacggcaaaccctgcggctggcggagacattcatcgcccccacgggggaagatctgctcttctacgtccgggagctgacgcaggagctgcagatcgaaaactgcgagatccggctggaaggaaacccgaccaaacaggacggacgcctgttgcgtgaatatttcaaacacgtcgccatatgcgaatagtcagcggaaaatatcggggacgggcaatcaacccgcccaagaatctgcgggcacgcccgacgaccgacttcgccaaggagaacctgttcaatgtactgggaaacctggtcgatttcgaggagtgcgacgtgttggacctattcgccgggacggggtcgatcagctacgaattcgcttcgcggggcgtgcacagcgtcacttcggtcgaaatcaatcccgtacactataacttcatcaaaaaaacggccgccgacctgggaatcgacaatctgttcgccgtcaaagccaatgtattcctctacctgaaaagctgtgcgaagcagttcgacctgatcttttcggacgcgccctacgatctggagggcagcgaagaggtcatccggctggtactggaacgcgatttactcaaaccggatgggtttctcgttttcgaacattcgaaaaacataaatttttcgtccgaccctcacttttggcaatcaagaagttacggaagcgtgcaattttctttcttcaaaaagtgagaaaaaagtttggagatacagatttttgtactacctttgcattcgcaatcagcaaacggtgtggtagttcagctggttagaatacctgcctgtcacgcagggggtcgcgggttcgagtcccgtccataccgcaaaatatcgaagcaaatgattgcaaagccttgtaaagtatatttacaaggcttttttctttttctgtatcctaaaaaaaggttcgaaatgctctccaaaagcagctaataatcagaggaagagcccccccctattttgtgctcgaagcattcagctactgtactttgaatcttaccagccatagacttttagagtaagttcgtaactaaaaagatatattatggaaagacctctttcagcgttttattctacctgtgtaaaacaaagacaaatcgtaatggtgaagttcctatcacattacgactcacagtaaatggagaaagaaaagagatgcgtatccatcggtttatcgatccgaaacaacgggacgcagcaaaaagggaagtaaataggagttgcaaagcgctcaacttatccctcgataccataaatctgcgtcgcttcgcacatatcgagagctggataaggcagggaaacacgttatcgctcaaacgggatcggatcgttatctggaacaaaatgttccgaatgccattccttaactgaaacattcaaagcacacaatcaaaaatcaatacgataattatatatctgccggtttcaaaggtcttcgaagaaagaatcaggtattgcaaaacgacaagtgaagagcattcaagtcccgaaaaaagcaccaagaagatttcatgatagctataaaattccaatggcaaatatattttcgtacccaatgataaaattcgatatgagtttgaaacagtttcaaaaacctatatcataggacaaaagacttgtattaattctaatgacttattccgcgactcgttaaaaactgtgaaaattatgtttgagactaaagcaacaatactccgatcgtccaagcacttcgaataacaattcggatcgctttgcaggcaaaaatcaggtatggccccccttgacaaggcaacaaaccgacaaatcttataaaaacaaaaaagagagcgatatcttaattcggataccgctctctcaaattcaaatcccgaaaagttatcggacattatcaacgtttcacactgaacacctcacgaggagtattcgcctgccgcacactctgcagtgcattcaacagcccggcaacgtcggcatccggttcttcggtatcgggcagttgcaacacaagaccgtccgccacatcctttcttatcaaataataaggaccaaccggatcttcatatttgttattaagcagtttgtcttgctcgacatctcccgtagaactgattccatacggccacatagacattatataagcaccttcattgttcccatccatataatacagcggacaaatcttaatcacagtcttattgagatttcccataaaaccgatgaatcctttcgaccacgaaggcatattctcatacattttatcatcataaggcaaataagtatacactttttcgtcaccgacagttccgacaaaattgtaccaggaaacatacttccatacaatatccccctccgtctctatgtcctgaggaaaagatatacctatcttatgataattgtcttccgccggttcgaaatccatttttatcgcaaaatcccggaatttgtttcgatccccgccccatcccttgagataaaacgatttcttatcatcagcaggagaaatggtaaccggaaattcttcacccacttcctgtacatcgagtgatccattctcctcctttacagtaccggatgtctgcaacagccactctccggcaaactgttcgtaagtcgattcatgcagcatctgcacttcccgagcctcgtaccaaaatctataactacgagaaacctcgccactgacgactatttcggaaagattttttccaaccggcgcaacaataaaataataatgatcgtaaccggtaaaagcaaaaggaacactttcggcatcacctttcaaaatcaatttatccgccacaagatcgtcccaagttttgcccaactccatataataatcgatatcctcctgcatccactccttcggatctcgttcgctattggaaggaatagcacttacccaataatatacctcggaatcggaaggtttcacttcggcgtaaggataaataaacgcattctcaatatagcgctcataaggtgtaacggtaaatgttacgctttcacctcctaaagtccttacagttccggaaaaccaatccgaaatggtctttccttcggcctttgcaaccactcggaccgaataatccgtagcaggcagaagcccgtccaaagaaaaagtcgtcgtctcggtgttctgtgcagctacagcaacgacttggccgtctttctcatacgaaacctcatatctgtatgaatccgctgtttccaaggcattccacccggcagtaaaagagacaccggtaatcgcgctgaatgtcacttccggtgccggaaatttattatcatctcctttcgtaccgtcgtcgtcactatcgcatgccacagtaatacaggaaatacaggcgacgaaaaataacataatttttttcataccaaaatatttaaaatttaaaatcagccatagcccggaatttgtatttcatccccttatccagttcctgaggaatctcgatcatggctccggatgccatatcgaacgcataagccatccgcgccgagcattcggcggaagtccaatagactgcatcggacaacgggacaccgcccttctccttgagagtgtcgttaaactgctgcttgttcttccttattttgtcgtcagacaggctgcctcctcctctcactccggaataagcctcgtacaaaagccctaactctctctgatccggcacataccagtttttaactcccataacatccttttcactgcaccacaggaacccgggataattctcccgccatccttccatattatatacacaatccgtattatatcgccccgtctgtgggaaagaagccattggttcttcgtatttgtaagaccatacggcttcagtttcatcaagcgaaaccacagttccactcttaccctccgaatcaatatatatcacgattccttttacaaagccgttctcgtaataatcccctatttcgtaagtcgtcgtcacgggaggaatcggatcacccggatcttccggttttgtaggagtctcctcggaatccttgccgcaaccggtcataagaccggctgcaacaagcatcatcaaaaataagattttagttctcataaaaacatcactattcggacaactcctcgatgtccactgttattgttcctcctgttatattattgaaaccgtctccggtatccgcagggcttgtatgccaaagtttatagactttcgtgggaattcccgcctcgtcataagcgacggaatagccataccaagtctgtccgaattgtgcgtccactttgtatgagcttgaactgggccacttggacgctttgagcagctccctcacttcggaagccgtcttgccagcccactcgtcctctccgacaaacgactgaaaatagtgctctttcgaattattcgcatacgtccaaaccctatacatatcccggttctcctccggatagccgtacgacattacgatgaactccagggaagccagggtcacctgatccgcaacggtagtgaattgggtcgtaaccggctctgtcgtataggtaccgtcggccttgagtccaaaaacatacagataatacgtagtaccaggagtaagcccgccgatctctatcggcacaaacagatcctccttgccgttcatgagagcacgagaaaggaactctttacgcgtcatcacgcccgaattcggatgagaatcgttccaatctttcactctggcatcgataaatgcgtccatatgagccttcagaccggcagtcttgtcccccgaaatagcgtcgtattcggctttcgtgatataattgaaaaggaatgtttcattttcataattaccgtcagcccttaccgtaaccatcgcatcgatcttggctatgctcgatacgctaagttcgtattggaccgaggacatcgctgccggcgacgtattgacctcgactttcttgagatttatcttgtcgtcgagtttcggcgatccgtccggattgcatgcaaagatcaaaagataatatttgtcgttgggaataaggcctccgaacgaaacattcgcaacatccgcataaagatatttggaaatattctggttataagcatcgtaaatcgtctgaatgatttcggcatccgatttggcgtcggcaaaatactcctgaagctccatcataacggcaaaagcctcactctgctctgccgtgactatagccgaataagcgacatcggtaacgacttcggagaataccgtataagaatttttaggagattcgctcgtcctaatagtttctaccgtagcctccgaaatacaggttccgtcattggccacacagactgcgaaggcataataagttccctccggcagaagattttcaaacgaggaatcggaagttttgccgctaacagtcacttcagcaatgaattccggcaacgtgtaagtcgcataccgctcggtttttttccactctgcaagatagttctcgacaaaagccggtaaatttgccggatcacctccacagtaatccatatatacggcagggagaagaatgtcgtaataatatacgcaatccgttcggtccggctcgacattcagcgtaaacgacgtcggcgtcacgtccgaagccgtaatcttgaaattcacctctacttgctcgacgaccaatgtcttgaattcataagtattgacagtcgtaagaatctccaattcggtcgataatccataggcgtaaaagacataatcggtctccggaacaagcgtattatatttccactcctgctctcctttaagcaatgcctccagcaagaactcctcgaccccgactccattagcctccgcgagggcttttatattttcgatgtttgctgcctgcaaactctcaagattttcaaactggctgaaatccgacttttcgagcactccgaaaaagtaagtcatattcttgtcttcgggagttatcttcaccttgaacgaaccttgcgtcagctccaaagtctcgaattgaaagtcagacgtcggctctggccccgttccctcggtatcatcgtcgctacaaccgaccaaaggaagcaggcaaaccgctcccatgaacaaaaaacgtaaaaacaagttcataacaataataatttaaaattaaacaaccttcgaagagatcctttagaagcaatttctccttttcgaaatttaaattataaaaaaggtcatggaaatccaagctcaatttcccccccccgaaaaaagcaacaaatagaaaagtaaaaacaacaaaacagacaaaaatcatccgatcaaattctatttatttttgaaaaaaacaaatattagacatacacgtactataatactcaaaatccctgcgatctttttaatttcaatgaatatcagaaaaaccaaaatactcctttattatctgcagcaaaacatctttaagccgcagatttctcatcttttaaccgaacactccgacttatagcccgaccgatcctcgttaggaataattattgcataataattaagataagattcgaaatgacgaatccacacacgacaaacttcgatttttccaaccgtttatgaatacaaacgactttgcattgaccatcctgttcggaatcaaaaaattcctcgcctggatcggcattccgtcccatatgctcgacaaaatggacgaactcctgtttctgatcgtaatcgtgattatcgcattcatcgtcgcgggaatcgtccacgccgtattggtgcatctggcgaaaaagattctgaaacgcaaacgcgtcggattcttcgaatcgatgttcaaatacggcgtatttcggaagctgacggccatcattccgccactgatggtttccgccctgctgccattcgctttcagcaaagattccgcctggttcatcctgagcgagaagatcacctggatctattttttcatcgccctgattatctccgtaaatgccatactgaacacggtcggagatgagcttaaaaagaacaagcaactgaaaaaccgcccgatgaagggctttatccagatattccgcgtggttttctactgcgtcgtcgtgatcgttatcatttcgatcctgatcaacaaatcgccgctcaacctgattacgggactgggtgctttcacagccgtattgatgctggtgttcaaggatactattctgggactggtcgcaggcgtgatgatctccgaagacgacatgctgcgcatcggcgactggatcgaaatgccgcagaacaacataaacggcaccgttaccgacatatccctggatgtcgtgaaggttcagaacttcgacaacacgatcgtgactgttccaccctattcgctggtttcgggttcgttcatcaactggcggggcatgagcgactcgggcggacggcgcatcatgcgcgaatataccctgaagctcgattacatcaaaccgtgcacaccggaatttctggagaaaatgaaagccttcgacaaagaactggcacaattcataaccgaaaaacagaagcaggcagccgatggaaaagtcgccaatacggataatcccgaaggtctggtgaacggaactatcgacacgaatctcggtctgttccgggcctacatggtgatgtatctgcggcgccatcctttcgtcagcaaagaactgctgctgatggtgcggacactgccgccggtagccaacggccttccggttcagatctactgtttctcctcgaacaaaaactggccgagttacgaatccatccaggcagaaatcatggaacacttcgtttccgtattgccggcgttcgaactctatccgttccaaaacgcagacgcccgcgatatgatcctgagcagctacatcgaatccgccaaagtcgatctatcgacactgatcggaatcccctggcatacgaccgtcacgcaaagcaacccgttcgatgtagaaaaacaggaggcgcaagactcatctccgaaagcataaccgattcgggatttcacccgctaccgacaaggcaatatcgggataagcgaacttcgggaacaggcataggttcgccgaggttacaacagccggacggacccgcccccgaccgattaggaccaaacgagaaacaccctgccggaatcggcagggtgtttctcgttactcgcagggcaacgtccggtaaaaaccgcattttcacccccccttctcgacacgcttctccgtttatatggtcatggcgaaaatctgcccgccataaaacagaccgcccctcgtcggctgctcttccgtcagacgatgctggcaccgccatcgacgaccacgtgctgaccggtgacataactcgaagcgtcggacgaaaaatagaggatcgtaccgttcagttcgccccggcgaccgggacggctcatcggatcggtgaaattgtacatcctcatgaactcctcgtttttgaaaagcgtatcttcggtcatctcgctctcgaaaagtccggggcaaacagcattcaccgtaataccatcgacgccgtacgaagcggccattccgatcgtcaatcccaaaaccgccgccttcgatgcgttgtaaacatgtcgggccagcaacggactcttgtccgcgatcagtgcgttcacggaagagatattgacgatcttgccgtaacggcgttcgcgcatgtgaggtacgacgtatttgcagaccagataagcaccccgcacgttggtattcatctctttgtcccattcatcggtggtcagttgctcgacagtacccggcacggcgacacccgcattgttgagcagaatgtcgatctttccaaagcgagccacgacctgcccgatcgctttgcggacctgctcctcgtcggtcacgtcgcaccccacgacaagcactttacgccccgttgcggctatttcgtcggctacggtcttcagtttctcgaccctgcgagccaacagtgccacgtcagctccctgaccggcataagcccgggctgcatccgcccccagaccgctcgacgcaccggttacgacagcaacccgtcccgtcaaatcaaacaaattatccatattgcattcgatattagtacaacaattcccgcttcgtgccttctccgtacccgaacgccgaccgacgcagctccccctgccgactattcacgaacgccgtccgtcaaaaccgtttggtgtaacgatgacagtacggctgcgtacctttacggttgtagtagttctggtggtattgttcagccggccagaagtgggaagccggagttacgtcggtcaccacgctatatcccttctccttcaggatacggatcagccgttcggcaacctccttctgctcaggggtagtatagaaaatctccgaccgatactgatcgcccaagtcgggtccctgtccgtcgagctgggtcggatcgtgtatctcgaaaaagagcctggcaagagtttcgtaagagactttcgaaggatcgaactcgacttcgacggcctcggcatgacccgttttatggctgcacacctgctcgtaggtaggattctcggtatggccgccgatatagcccgaacgaatgctcttcactccgtccaccttacccagcatatactccacgccccagaaacaaccgccggcgaaaatagcccgttcggtttgcaccgatttcggcggctcggctgacgaggtattttcaggcttttcggcagaagccgctgccgggtccgtgaccggcacggtcggaacggctaccggcacgaaatcgagggagagggaattcacgcaatggcgcgtatttttagcggtaaatccttcgcccgtaaagacgtggcccaaatgggctccgcacttggcgcagagaatctccgtacggcgtccgtcggcatccggttcgcggcgcacggcacccggaatttcatcgtcgaagctgggccagccgcagccggcatcgaatttatcctgcgaacggtacaacggagcaccgcaccggcggcagcggtaggtgccgtcttcgtcgtggaggtaatatttaccggaaaagggcgcttcggttccttttcgaacgatcacccgctcttcttcgggagtcaatggtttcatattctgtgcatttaaagttattgccatgcccgtaagcacggtcgcaatcgacaaacagcgtatcatatttttgttcctgcaaaaaatacaccgaaattgtccggaaacgtattcatccatacgcaagatagcgacctcttccgtgcaaccggaaatccggccggtatcagcgaggaatgaagtaaaaagaacaaaaagccggagcagaataccctgccccggcttcgaacgatatatcggcgaattacttcacctcttgcccccggaggaatacccggtggataagcggagaggtataggcatacggcagatatgccaccgaaggaatcttcgtcgtgaggaagaagttcgccttcttgcctacggtgatcgaaccgtactcgctgctcaagcccatggcgtaagcaccgttcagtgtcgcggcgttgatcgcttcggccggcgtcatacgcatcttgatgcaggccagcgaaacgatcatcttcatactgcccgaaggcgatgaaccggggttgaaatccgaagccaaagccacgctcaaaccgccctcgatcattgcccgtgcaggaggatacggcatctccaggaagaaagcggcacccggcagcatcgtcggcatcgtaccggacgtacgcagcacttcaatctcctcggcccccatgcgctccagatgatcgacggacagcgccttgttgcggacaccgacctgcacaccgcccgaaacggccagctcgttggcatggatcttcggcacgagaccgtactcggcacccgcacgcaggatctgctccgtctcttcgacggtgaagaacccctggtcgcagaagacatcgacgaactcggcaagcttctccctgccgacggcagggatcatctcccgacagatcaggtccacatactcctgctggcggcctttataggcccggcctacggcatgagctccgaggaaagtggcacggacggtgatcggcgaagtttcgcggatgcgacggatcacccgcagcatcttgagttcatcctcggtcgtaagaccgtagccgctcttgatctcgacgcagcccgtacccattgcgataatctcgcggatacgttccatcgcctgctcgtaaagctcgtcctcggaagtttcgtgcaagcggtcggcggaattcaagatgccgccgccccgcttggcgatctcttcgtagctcaagccgttgatcttgtccaggaactcctgttcgcggcttccggcataaaccagatgggtatgcgaatcgcagaacgaagggaaaagcatgcctccctccgcatcgacgacttccgtgtcgggagccacctccggcatcttgtccatcgtgccgtatgcagcgatacgatcgccgtcggccagcagccaggcgttgtcgatctcgccgagtacattcatgtcgcgccccttgacccgaagacggccgctctcgtccacgccgacgatcttggctatgttcttaacgagtaacattacaatttctcggtttgaaggaatttcaccgaagcgtcgatcaacgtgtacatcacctgatcgttctcgacgaacggcacatgcttacggtaagctgccagcagatcctcgatgggcttcgaagaacgcagcggacggcggaactcgagggcctgtgccgcattgagcagctcgatagccagcacacgctcggtgttcagcaccacacggtagagcttcgtggcagcgttggaacccatgctgacgtggtcctcctgaccctgcgacgaaggaatcgagtcgcacgaagcgggccagcaaagacccttgctctggctcacgatcgaagcggccgcgtactgcggaatcataaaaccgctgttcagacccggcttggccaccaggaacgagggcagctcgcgtgcacccgaaatcagcttgtaaatacgacgctcggagatgttgcccaactccgcaacagcaatagccaggaaatccatcgccagagcgatcggctgtccgtggaaattaccggccgaaacgatgatatccttctcggggaagatcgtcgggttatccgtagggctgttgatctcggtttcgagaacaccgcctacatagtcgatcgtatctttcgacgcaccgtgtacctggggaatgcaacggaacgaatagggatcctgcacgtgcttcttcggacgggcgatcatctcgctgccttcgagcaggcgacggaaattgcgagccgtagtaagctgtcccttgtgggcacggatttcatgcacctcgtcgatgaacgggttgatgcggccgtcgaatgcgtcgagcgacatcgcgccgatcaggtcggcccactcgctcaagcgacgagccttgataagcgaatatacgccgaaagccgacatgaactgcgtaccgttcagcagggcgaggccctccttcgattgcagcgaaataggcttccagccgaactccttgaggacttcgtccgaaggacgccgtgcacccttgtactccacttcgccgaggcccagcagcggcaggcacatgttggccagcggagccaggtcgcccgaagcgcccagcgatccctgctggaacacgaccggcagcacgtcgttgttgaagaaatcgaccagacgctgtacggtttcgagctgcacgcccgaattgccgtacgaaagggactggatcttgagcagcagcatcagcttcacgatctcggcaggaacgcgctcgcccgtaccgcaggcatgcgacatcaccaggttcttctgcaactgcgagagctggtccttgtcgatcgaaatattgcagagcgaaccgaagccggtcgtaataccgtagatgggctctttctgggtttccatcttgttatccaggtattcgcgacaacgcacgatgcgttttttcgcatcttcgctcaagtcgattttgatattgttttccagaatttcgcggacacgatcgaccgtaagatactccgcgctgatatgatgaatcatcgttgtatttcttattaaaggttaatactcaaaaataagtcgaattgtttttcggtgctctcgacgtccggcgtacagggaatcccctccgcttcagccaatcgaaagcattctctccgtccggcagcaaccgaacggagagaagaccgatctattatttcacttcgtcgatagccttgcgaaccagcttgtcgtccgccaggttgggaagggtcaccttcaggcccggggtacgctccatctcgcgtttgatagcgaacatcgcgccctcgttgcgggcccagctgcggcgtgcgataccgttgttcacgtcccagagaagcatctccttgatatgacgcgcggaatcctccgatccgtcgatcaccataccgaagccgccgttgattacctcgccccagcctacgccgccgccgttgtggatcgaaacccaggtagcgccgcggaacgagtcgccgataacgttctgcacagccatatcagccgtacggttcgaaccgtcgtagatgttcgaggtttcacggtacggagaatcggtacccgacacgtcgtggtggtcacgacccaatacgacaggtgcggaaatttcgccgcgtgcgatagcgtcgttgaacgcgagcgcgatcttggtgcggccctcgctgtcggcatacaggatacgtgcctgcgaacctacgaccagcttgttcttgccagcctccttgatccagtggatattgtcgtcgagctgtccggcgatctccttcggagcggtcttgcgaatctcttcgagcacttcggtagccagacggtctgtagtagccaggtcttcgggtttgcccgacgtacatacccagcggaagggaccgaagccgtagtcgaagaacatcggccccatgatatcctgcacataggaaggatagcggaaacgaccgccctcgcccatgatgtcggcaccggcacgcgaagactccaacaggaaggcattgccgtaatcgaagaaatacatacccttggcggtcagcttgttgatcgcagccacctggcggcgcagcgactcctgaacacgcttcttgaactcctcgggatcctctgccatcatgcggttggactcttcgtagctcaagccgacgggatagtaaccgcctgcccaggggttgtgcagcgacgtctggtcggaacccagatcgacattgacgttctcggcagccagacgctcccaaagatcgaccacgttgccctggtaagccagcgacacggcctccttgttctcctgtgccttcttcgcacgggccagcaactcgtcgagcgaggtgtacacctcatcgacccagccctgcgaatgacgcgtatgcaccgctttggggttgatctcggccgtgatgctcaccacaccggagatattacccgccttcggctgcgcacccgacataccgcccagaccggccgtcacgaagagcatgccgcgaatgtctttcttaccctcggtaagacgtttgcgggctgcgttgagcaccgtgatcgtcgtgccgtgcacgataccctgcgggccaatatacatataggagccggcggtcatctgaccgtactgcgaaacgccgagcgcattgaaacgctcccaatcgtccggtttcgaatagttcggaatcaccataccgttggttacgatcacgcgcggagcgtcgggatgcgacgggaacaggcccatcgggtgtcccgaatacatcaccagcgtctgatcgtcggtcatctgggacagatactgcatcgtaagcagatactgcgcccagttctggaacacggcaccgttaccgccgtaggtaatcagctcgtggggatgctgcgccacagccttgtccaggttgttctggatcatcaccataatcgcagcggcctgacgcgacttgtggggatactcctcgatcggacgggcatacatctcataatcgggacggaaacgatacatatagatacgaccgtacttgtgcaactcctcggcgaactcgcgggccaacacttcgtggtgcttggccgggaagtagcgcagggcattgcggatggccagcacgcgctcctcctcggtgaggatctccttacgcttgggcgcgtggttgatggtgggatcgtacggtttcggtgcgggcagcacatcggggatacccgccttgatctgctcctgaaattcctttacagtcattgttttatatgtattaaattatttaatcttgctctcgacgatttccagaatctcacgctcggctttctccgcatcggcgacgatccggttggcctggccgatcaggtcatcggcgacggcacggtctttcagaccggcggcattgatcttcacgttcagacacgcacccagcacggcgctgcgggcagccagcgctccgacgccggcgtcggttaccgaattgggatttccctgttcggccatcgccttcacgatttcgaacaccttgaacgaggtctgcatcgtacgcagaggcacctgcgtagcgtagagcgtagcctcctgcaatgcggcgctacgggcagctttctcctcgtcggtacccttcggcatcgagaatacgttcatgatccggttgaacgcttcggtatcctcatcgaccaggtgcagcaactcggtcatcagcttctggcctttgtccgcccagtcggagaactcctcccaacgtgcgtcccagccgggtttgtgcgacgacaggttggcgaccatcgtacccagggcagcgcccagcgcacccatgtaagcggaaatcgaaccgccgcccggagccggggactcgctggcggtctcctctgcgaagccggtgcaggtcagatcgaccagtttcttcttcttattgtccgcttcgatcaggtattcgatcaccttctcttccggtttgaacggcttcaactcgtccagacccatcgacttgatggcgatacggatgatctcctcctcggaaataccggtcgaacgctcctgcttcttcaggaaatagcggcccgcctcgatcaacgtgcgcttcggaatcaggccgacgatctcggtaccggtcacacgcacaccgcgtgcgttggcggcgcggcaaacctcgtcgaaagccacgtggagcggcgtaacggaaatattggtgatattcatcgaaacctgggcgatctggtactcgtcgatgaaccagccgatcgccttggtagccttcagcgtaccgggcttcatgatggtcttgccgttctcgtccttcaagggtttgcctacgggcgaattgccttcgcgtaccggacggcccttttcgcgcacgtcgaacgcgatggcgttggcgcgacgcgtcgaagtggtgttcaggttgtagttcacggcgatcaggaagtcgcgtgcacctacggcggtggcacccgtgcgtgctacgccctcgtcgaagggacggtcgccgaaatcgggagctttgccttcgtgattcatcttctcgggcagcgcctcgtactcaccggcacgacatacggccaggttgcggcgctccggcgtaaaggcagccgcctcgtagcaataggtcggcacatgcaactcgtcggcgatgcgcttggccaactgacgggccagctcggcgcactcctcgagcgtaatacccgcgatcgggatgagcggacatacgtccgtggcacccatacggggatgcgctcccttatgattacgcatatcgataacctcggcagctttcttgacgccctggaaagccgcttccagcacggcttcgggttctccgacgaaggtaaccaccgtacggttggtcgcttcacccggatcgacgtcgagcaacttgactccgtcaaccgcctcgattgcggaagtaatctgctgaataacagccttgttacggccctcgctaaagttgggcacgcattcaataatacgtttttccatgtattttagagtatgttaagaatttgtattcgcttcagaattagcccgtaaaacagacctacaaatatacgaaataaataaatatccctccaaagaaagttacaaatcttttatcgaaacggactatacggttacaaactatcacgtattccacggccgaatctcacaatacgacacttttcgcaacgataaaacgggccgggattcgatcccggcccgccgcaaacaaacttttccggacattacccgatcgtcacgacgataccgcccgaaaaccagacgccgggcatctccaacccgccgaaatcgaaataacgggtatcggtcatgttcatcacgtcaaaatagagcttccaccccttcttttcccacgacagacggccgtccaacaggaaataaggcttgaagtcacgcacttcggtcatcatcttgccgtcgggatccaacatcagggaaccgtccgcattacgcaaataataggtatagctgccgttgcggtcatataccgcaccggtcagcgtgagcgaacagttacgcagaaaacggaattcgaccgtcgccgccgctttgtgcttcatataatccagcgcactggaagtgatgacccgatcgactttgctcgtatggatatagccgtatgaaaccgaaatccggtgcagaaacccggtcgtcgtataaccgcccgaaacctccagtccataggtgtcgagcttgctctcctgctcggagtgccacttgcccagctcctcgcgccaaacccagtcgatgatgtcgcgcccctgccggtagtaagtaaacagcgaagcattccacccgctgcgggcgtaatccgccgcgaaacgataggtaatcgcatgttcaggcttcaaatccagattattgagctgtgcaggggatgtgtaataaagatcggtgaaggtaggcagtcgcatcgactgggccgcaccgacctcgagccgcagcccacgcaccggacgatagcctcccgaaagactccacagggccgaagtcccataaggcgtgaagctcaccccggccgaaccggaaacgtcgaaacgctcccactgtttgacatgccgcagccagagatttcccacgtgacggtccttggcatgggtatatttgccgtgcggagtcggaagcggctcgccgagattggtgctgtaaatgtggttgtaggtgtaatcgcctcccagggaggtcacaccgcccttccacgtacagtcggcccagaactcggctcccgcattgtccgtattgtgatgattcatcggcgtaccgcgcgtccagtcgtaacggtcgaaattcttgcggtagctgaccgacgaattgagcgtgaaacgcccgacggatttcacccatcgcagcgaagagagcaccgtcgaagtatgctcgaactgatcgggattgtacgcggcatagaaaccgttcgaaccgaacgaccggttctgataaccggcctggaaatcgaaaaatccggccttttcactgtcgtagttcatccgcaagtaaccgttgtagttctcgaaatcggtgttgtggatatacccgtcgctgcgacggtacgacccggcggcaaaaagggaaaaacgtcccttggtcacggcccccgagagattgccgtacgcatagccgtcgtcgccgcccgccgcctcgatgcgcagatagcgggatttgagaggcatcgtgcggatattcagggcccctgcatacgcaccgacgcccgatacgccgtcgatcagatcgattcccgcgatgcaatctatgtcgatcggcagcgaatgcgactgatgacccgttcgggcatccgtaaagttaataccgttgagcatgaccatcgtctggtcgaaggaacctccccggatcataatgtccgcctgcgttcccctgccgctccgttcccgaagatcgatcgcagggctcaaacgcagcacagactcgagggtctggaccggcgccgaagcacccgcctttcgatcgaaaacggaggtggacgacatcgcactgcgcgtgggggtggctttcacccccgtcacctcgaccgtttcgatctccagctctctggcgatcgtaagcgaatcgacggtctgcgcctgcacgggcgtcgtcgtggacaggagaatggtggacatcgaaacagagaggactccgatggtaacctggcgccgaaggctcgcgaaagcggcgtaacccttgcgacaccagcgcctgaagcgcggagtacgctttgtttggatctctttcatcctgtaaaaattaaagtgattaataatatcggcatcggttcctctgcagcggaacttcggcctgtcggggtgcaaagataatccatttgtccggacacacaaacgaaaaggccggccctatggctggccggcctctcttttccattctattttttattaccactctttcaccttttcggatgccttatcgaccaattccttggtcttgtcaagcactttgcctgcctgctccttggcctgtcctttcagttgctgcgcctgctggcgggcgctttccttgacctggccggctttcgctacgacctgttctttcacctgaccggctttcgcggccacatgctctttcacatcctgtaccgtatcggacagatccgccttcagacgctctttgtccgcattcaatttctcattcatacgaataattttttagtctatctttttctcttttttattgcctacggcagctacgatccacaacaatacgatagcaccgactaccgaagtgacgatactgccgatggttcctacggcgaaaagtccgaacagcgagaagatccagccgccgagcaccccgccgacgatgccgacaactaaattgacgatcaggccggacccccgccctttcacgatcaggttggcgagccatccggcaaccaaacctatcaataaataccacaagaaaaacataatcgataattttttaagttctttcgatactgcttgtacaaaatctccgccaaacccgaaaaacgaccggactttatcgcaaccgccccaacgccacctccggccggacaaaaatcaagggaccgctccgcaaaccgaacggaagatccgggaaacagctcaggaatccgacagacgggcaagctcaccacatttgactacctctcgcctccgaaatacctaaaacgggtgattgcccgcccgttttaccccccctacttttgcaaacgaataaaaccaaaagcccatgattaaaaatatctgcactgtcatcctattattattgtccgtcctgcccgcagcgggacaaaaccgggtaaaggtcaaaatctcgggcaatgtcatcaccacagacggcgctccggccgaatacatcacggtttcgctgaaaaatacggtattcggcgggatgtccgacggggacggcaatttcgaatttgcggctcccccgggcgaatatacgatggtcgtccaatccgtaaccgcccaccgcaaggagtttccggtcaccatcgaaaccggtcgggaaaacgtattcccgaacatcgaagtcaaggaagatatcaaccagttggaggaggtggtcgtcaccggacagttctcgccgcaatccatgaaaaactccttatataaggtacggtcggtaaacagcgatcagatccggcaaaaggcacccctggatgtacagtcgcttctcaacaccgaaatcggcatccgcctctcgaacgacatggcgctcggagaaacggacttcgagctgatgggtatgagcggcaacaacgtcaaaatcctcatggacggtattccgatgatcgaccgaggctcgaccaaacagagcctcagccaactcgacgtaaaccggatcgaacgggtcgaaatcgtcgaaggtccgatgtcggtagtctatggcacggacgcccttgcgggagtcatcaacatcatcaccaaaaagggaccgggctattccggcgaaagcacctggcgcgtgggcgcccgcatccaggaagaaacgatgggcaaggaataccagttcttcaacggcgaaggtcttcacaacgaaagcatcgacctcggattcaatcttaaaaacggactctacttcaacggcggctacacccgcaacgacaacggcggctggcagggcgacctgaccggacgcgaaaagcgctggcatcccaaagaccagtcgctggccaacggtatgatagggttccagcgacgcaacctgaacgtctggtaccggctggatttcctcgacgagaaaatcttcggtcctctgaacggtaccgccatcgaaccggagaaggtttccgacaaggactatctgaccaaacgatacacccatcagttacaggcagactggagactggacaaccggttgagcgtcaatctcgccctctcctaccaggactacaagcgccgcacgcagaccacctggacagacctctcgaccggagagaaatggctctcggccgaagatgccagtcaggatgtcacccagtacaaagcctggatcgcacgggcgacggcaacctggaatatcggcccgaagatcagccttcagcccggtttggaataccaatggaccgaaggcaagggcggacgcatcgacggcacccccacgatctccgatctggcattcttcatctcggccgaatacaaaccctggagctggatgagcgtacgccccggcgttcgggctttcctgatggccgactacgaagctcctgtggccgtaccttcgattttaacgaagttcgatctgacacccgatatggacatccgcctctcctatgcctacggcttccgtacgccgaccctgcaggagctctacttctcgttccacaacgacaaccacgacatcgacggcaacccggacctgaaagccgaatattcgaacaatgtcacgggatcgttcacctaccgcatcctgcataacgcgcggatccggctcaccaccacgttgagcggtttctacaacgtcttcaaggacaagatcagcctggcgcagaacgtcgatattcccaactacaacacctactacaacatcggccgctacaaaaccctgggcggggcactggaaacctcgctggcatggggcggattacgcgtgaacgtcaatgcttcgctgatcggacgctacaacaaatatgcctccgacgataaaagcctgccccagttccgctattcgcccgaagtgagtacgaccatcagttaccatatcgccaagtcgggaacggacatcagtttcttctacaaatacaccggccagcgcaaggagtactattaccacgaatacacgaccccggacaacaagaaagagagcgaaatttacctgaggggactcccctcctaccactacggggacatcaccgtcacgcagaagctgacctcgttcctgagcctgaacgtaggtgtcaaaaacctcttcaacctgaccgacatacgcacgatcgtagaatccgcgaacgacaccccttcggtcagctatctcggctgcggacgcagctacttcatcggactgaacttgatgctgaacggaaaattcaaaaaataacaaattcaatattaactaattaaaaccattctatgaaaagattactttacttactgtcagcctgtctgatgaccttcggattctcggcatgcaacgacgatgacgacaacctgaagttgcaggacatttcggtcgaattcgccgtatcggaagccggcatggacggcgaaaccgtcagcctcggcctgaaactcagccgcgctacgaccgagagcttggacgtaacgatggaaatgacctcttcggacgtatccgacgcggacatcacgacgaccccggccatgaccgacggcaagatcacggtcaatattccggccggacagtccacgggcactttcaccgtagccaaagcgacgggtaaaaaccccgagggaacggcgaaattccagattctctccctctcgctgaccgaaggctacaagatcggcacgaccaaggagatgaccctctcgttcactccgatcgtctccacgggcggcacgatgacgctcgaagggaaagtcggtgaccagaactacgccaacatggtctatgtcgatctgagtaataacagccagatgcagatcgaccgcaagagctggaacctgggcttctactgcggcgatgagttccgcgtggtactcaactcttcatacgcaacggtagcggccgcttccgagaaaacggacttcgcagccgtaaccctcgaagatgcgcagagcgcacccaacatcgccgcaggcagcatgtccgaagacttcaaggcggaatggatcgacgacgtcacgggcgacctgtcgaagaccgcattcggcgaaatatcggctacggatgcgaacaacaaggtatttttcgtggcctcggccgacaacaagaccaataccgacggtacggaaaaccggagcctctggtacaaagtgaaagtcacccgcagcggcaacggctacaaggtagagtacggcaaggtggaagatacgaccccaaaaaccgtcgaaatcacgaaagacccgatttacagcttcatcggactctcgctcgaaaccggcgaacaggtgctccagcccgccaagagcaaatgggacatcatgtgggcctacgccgcctcttcgaccatgatggcatcgggaccggtgatctcgttcacgcaggatgtaatcacgatcaacaacctgggcggcgcggaaacagcgatcgtcatgacggacaccaagtcgtatgccgacttcaaacgtgcggacgtggcatctgcggagttccagacggaagcgaacacgatcggcaccaactggcgcacccccgcgatgccgggcgtggagaatccgggtgtcaaggcagaccgtttcttcgtcatcaaggactgtgcggaaaactactacaagctccggttcctcaaattcggttcgggcgacgacggtgagcgcggacgtccgcaactggagtacgagttgctgaaatagacgaaatgatgcgatcggattggctggcagcaccggaactacgggactgccggccaaaccacgcaaaaagagtccgttttcaagatacggcccgtccggtatggatccggacgccggcaatcctcaagaatcttaacaatttacacttcgaataatggcaaaaaacaagaaatggatcctcgcggccgtcgccgtactcgcagtggtcctgtgctgctgggcggcgtggagcaaatgggcatccacgacccggatcggactggtgaacttccagaactatcagacggccagcctcgtcaaatccaacgaagacaacttcatcgaatacgaagaaataccgctcgaccggctcgaccggctcggacgttacgacctggtgctgggattcggcatgggtctgaaaatcactgaagagcagcgagcgcagatcctcgcggcagccgacgaaggcacccctatctacatttacgccgccaccaatccggaaaacgacatctgtagcctcgacagcctcaccaaggccggaatctcggcctacatcggcaacggcaacaagcggaattaccggaatatggcccgctacgtccgccagcatatcgacgcgaagcgcctcttcgtcacaccggctgaagaagctgtcgagagcgcttcggacgtgctctaccacttggacgaagacctctcattcaaaaccgtcgcggactatgagaaatacctccgggaacagggaatttatcgggagaaagcccccaaaatcgcaatcgtaggcggtctgaacgaccccttcagcggcaaccgggccaacatcgacagcttgatcgtatcgctgcaaaacgcaggaatgaacgtctatcccgtttcgtcgtaccgccagcgtctgacgttcctgcgggaaatcggccccgacgcggtcatccacttcgcgcacgggcgcatggtcatgggccaggccgacgcagccgtggagtggctgaaggagcggaacatcccgatcttctcgccgctctccatgctggaaacgcaggaggagtgggaaagcgacccgatggggatgttcgggggattcatgtcccagagtatcgtcgtacccgaactggacggcgcgatctacccctacgtgctgaacgatcaggaactggacgaagagggaatctacctcttcaaggccattcccgaacggctgaagaatttcacccggatcatcggcaacttcatctcgctgaaacggaagccgaatgctgaaaagaaagtagcgatctactacttcaaaggcgccggacaatcctcgctgacggcccagggactggaaacggtgccgtcgctctataatcttctgaaacggctcaaggccgaaggctacacggtgaaaaacctgcctgcgaccgaaaaagagttcgaaaagctgctgatgacgcagggtgccgtattgagcacctatgccgaaggagctttcgacgacttcctgaaaaacggccgtccggcactggtcggaaagtcggaatacgaatcctgggtgcaggacgccctgcccgaagagctctatgccgacgtcgtgcaactgtacggcgaagcgccgggccgctatatgagtacggtccgggagggcgagccgtgcctggccgtagcccgcatcgatctgggcaacgtcgtgctgctgccgcagcccatggctgcggtcggcgacgacgctttcgccatcgtacacggcgccaaaaccgctccgccccacccctacatcggcgcctacctctgggcgcaatacggcttcggagccgacgcgatgattcacttcggcacacacggcagcctggagttcacgccccggaaacaggtggcgctctgccgctacgactggcccgaccgtctggtgggcaccattccccacttctattactacaccatcggcaacgtcggcgaaagcatgatggccaaacgccgctcgtacgctacgacgatctcctacctgaccccgccgttcacggagagcaagacccggggacagtacaaggagctgatgaacaaaatcgaagcgtactacaagaccgacgaggcccgccagccggaggtatcgatcgccgtgaaaaagatcgccgtgaagatgggcctgcaccgcgacctgcggctggacagcctgctcacgcagccctacactgccgaggagatcgcccgcatcgaaaacttcgccgaggagatcgccaacgaaaagatgaccgggcagctctatacgaccggcgttccctactcgccggagaagatccgttcgtcggtaatggccatgagcgccgacccgatcgcatacagcgtagcggccctcgaccgccagcgcggaaaggtagccgacacgcagctcaagagtcaggcattcttcacgcagcactatctggagccggccaaacaactggtccgccaggtactcggcggacagaaagccgacgacgcactggtctgccgcgtagcgggaatcaccccggagaagctcgccgaagcgcacacgatcctcactccgccccggcgaggtatgatgatgggccgcgcagctactcctgcggaatatacggccgatcaaaaacgcgaagcgcaggccatcgccgaagtggagcgtaccgtgacgaatatccagaactacaaacgggcgctggaggagagtccggaaatggagatgcgctcgattctgaacgctctggcgggcggatacgtcgcaccaacttcgggcggcgatgccgtggccaatccgcaggcggtgcctacgggccgcaacctttatgctgtgaacgcagagaccaccccgtccgaacaggcctgggccaagggcaaggagctggcggagaatacgctcgcacaatacaagaaaacgcacggcgactatccgcgcaaagtcagctacaccttctggagtagtgaatttatcgagagcgaaggtgcgacgatcgcccaggtgctctacatgctgggcgtagagccggtacgcgacgcctacggccgcgtgtccgacctgcggctgattccctccgagcagttgggccggccccgcgtggacgtaatcgtgcagacctcggggcagttccgcgacctggcggcatctcgcctggcactgatttcgcgggccgtcgagatggcggcggcagcgaccgacgaccggtacggcaaccgcgtggcggaaagcacggtggagaccgaacgcctgctagtcgagcagggcgtatccccgaaagacgcgcgtgaaatgtccacgcagcgggtattcggaggtgtgaacggcatgtacggaaccggcatccaggacatgatcaccagcggcgacaagtggaccgacgaacaggagatcgccgacgcctacatcaacaacatgggcgccgtgtacggcagcgacgaagagtggggagagatgaaggccggactgctgcgggccgtgctccacaacacggacgccgtcgtacagccccgtcagagcaacacctggggcgcgttgagcctcgatcacgtctatgagttcatgggcgggatgaacctggccgtgcgcaatgtcacgggcaaggaccccgacgcctatttcgccgactaccgcaaccgcaacaacgtcaaaatgcaggagctcaaggaggctatcggcgtggaatcccgcgccacgatcttcaatccggaatacgtcaaggaggtgatgaagggcggcgcatcgagcgcatcgcagatcaccgaggtcgtgaccaacacctacggatggaacgtcaccaaacccgatgtcatcgacaaggagatgtgggaccggatctacgacgtgtatgtccaggacagctacggcctgggaaccgaacagttcttccgtcagcagaatccggcagccctgcaggaaatcacggccgtaatgctggaaactgcccgcaagggaatgtggaaagcctcggagcagcagctcaacacactggcgagcctgcacacggagctggtcgaagagttcggctcgacaggcagcggattctcgggcggcaacgccaaattgcaggagttcatcgccggacgggtcgctccgcagcatgcggcggcctacaaacagcagatccagaccatgaagaccgtacaaagcccggataacaagaacgggatggtactcaagaaagacgaagtgtccagcggtgaacaaggtcggaaaaacgccctgaacggcgtatggatcgccggcggagtactggtgttgttcgtcgtcctgctgctggtgctccgcaaaaagagaaaagacaactaatacgatactatgcaactaatcatcagcgtactcatcctgttcatcctcatcaactgcgtgctcaaactcagtttctggaggatctggcaggccgctctgttcggagcggtgtgcggcgccttcgtcatcgcgacctacccgtacgccattctgcaatcgaagacacagttggccgactacctgcaaaacacgacggctctgcaaaatatggccgttatcatcacgctcgaatcggtcgtctgcttcgcctactgcatcgccgtgctgcggggttggttcggacaacaggaacggtggtgggtgaaacccctgaagtggtaccccagcctgctcgtcttccccgtgctgttctacctgcagaccgaattggtgttcagttttcccggaacgtcgttctcggcgatctcctatgcgttcgccgcagccgtcgtcgtgctgttcccgctgctctgccaccttttccggctcctgctgccggaaaaggagatgcggctggagacgcactttctggtgagtctcttcgtctgcatcatcggcctgctgaccaccgtcaacggcaatgtaacctatccggcggtcgatgagccgacgaactggcgggcactgggattcgccttcggactgttcctggttctcttcgtgcttggggcgctctggaaccgcatcaaatggatcgtcctgcaaaagcgaaacgcccgcaaaaaacattcggcacaaccccgaaccgtcataaattccaagaaatcgtaaaacaaataaacttatatggaaaccatttcacaagtacttttctgggtggccaacagcctgcttatcccggatattctgctgctgttgctgctgttcatccgcgccctgctgctcgtgggcggcatctacaaccaatacatggccaaacgcaagaacgacaagcgactgaacgacctgatcaaaaacctgacaccggacaaggtggacgacctgcgcaaagcgctgcccgcgaaagacaactcgctctacatccgctatctgcgcgacctgctgaccaacccggccagccaggattacgcagactacctgatctcgaatttcgagaacgacgccgagaaggacgtgatcctgtccaaacttctcaccaagatcggccccgtactgggtctgatcggcacgctgatcgccatgagcccggcgctcgtgggactctcgacgggcgacatcgcaggtatgtcctacaatatgcaggtcgtattcgccacgacggtcgtgggcctcgtgatcagcggcgtgggcctggtatccctgcaattcaagcagcgctggtatgccaaggatgtcaataacctggactacgtatcacggaaactgatcgaaaaaaacacggaagcatgaaaccgacccgcagaaaaagcaagttcgccgtacaggaagactccgatccgctgagcgtggtggtcaatctgttcgacgtggcgatggtcttcgccgtagcgctgatggtcgccatggtaatgcatatgaacatgaccgaagtattcacgcaggaagacttcaccgtagtgaaaaaccccggcaaggaaaatatggagatcatcatgaaggagggaaacaagatcaacaaatacaccccctccgaacagcagggttccggtgcgaagggcaagcgcgtcggcatcgcctacgaactggaaaacggagaaatcatttatgtaccagaataataaacagaacggaaaatgaaaaagatcctcgtatcgttgatctgctgcctgaccgcaacgctcggttgggcacaggagaaaaatgcctacacgctgttcgacgcccagggcaatcgggtcgattacacgcagatgatggacgtgctcgaacggcaggatgtcgtattcatcggcgaaatccacaactgccccatcgcccactggatggaatacgaaatcgtcaaagacctttacgaccggcacggcgaccggctgatgatcggcgccgaaatgttcgagcgggacaatcagctgatcctcgacgaatacctggccggaatgattacccccgaacggttcaacgccgaagccaagctctggcccaactacaagaccgactactctccgatcgtcgaattcgccaaagagcacaagattcccttcgtcgccacgaacgtagcacgccgctacgccaacatggtcgccaaaggcggattcgaggcgctggacgggctttcggacgaagcgaaacggtatgtcgcaccgctgcccctgaattatgtgcccaacaagagcgtggacgaatatttcggggccatgaaaatgcccgggatgaaacagagcgccgcagaaaacctttcgaaggcacaggcggtcaaagacgctacgatggcctggtcgatcgccgaacggatgcagtcgaaactcgtccacatgaacggcaacttccactcgacggaccacagcggcatcatcacctacctcaaccagtaccgtcccggtctgaagatcggcacggtggaggtcatccggcaggaaaataccgacaagctcgatcccgaagcactcggtaaggccgatttcttcatctgcgtacccaaagacatgacctcgacgttctgatcgcagacaaacgaaaaaagaggggacgatacggaaaatcgtcccctctttttttgtcgcgccggccttttcggatcgtccggacgctattttatgcgaacagggcttccgttttggcgatcacctcctccgggtcgggatcgatcgggaaaacatgatcgggcttcaggtaccacagcgttttatcctccttgaaatggagttcgccgccgcccgtaatattcagcatcaccacggcatctttggcgatcttgccctcttctacagccttgatgagcgatgcggtggcgatgccggccgccgaatagatatcgacgccttccaactcgaggaacagacgccgcgctttgcgggcgtgggcattggtcagcgcgaacatctcgccgtcggtggctttcagcgcatcgtaaagaccgccggcgatactataaggcggtttgcggttcgacagcaccttggcgtcgatgatctccacgtcacggcgggctttgtcatcgtcgtaatggagcatgtcgcgcgaatcctcccgccaggcgttatacatcggcacgaacggcgcgttctgcgaaaccatcagcttcatcaggtgactaccgaaacggccgtcctcgataaggcgcatattggcttcccaggcggcaatagcacccgtaccgctgccgacggcctggaaatagtagtcggggatccgaccgatggtcgtcgccgccgacagtacggtagtcgccataccgtcacggcgtgccacgtttttcgcaccgccctcggcataaaacttatcgctcttgagtgccaggttgctcaaatggatcgcatcgaaataatctccgcccttctccgaacagatcagtttcacgcaaggatccagcggttcgtcgaaccacagggcatcgaggttgtcggcaggcaccgacaagagcagcggaatccggttgtcggagcagaccttggcgaaggcgcgggccgtattgccggccgacgccacgacaagcacccgcttctcgttctcgtcgatacgggcacagacgctgtaagcctccgtttccttgaacgaacaggtcgtcatgtgcgccccgatagcagggtaatagccgttgaaggtaatgtagagattttccagcccgaggtgtgcggccagccctttacttttgtaggtcaccggagccttcgaattttccagcattcgtcgaacaggcagccagtcggcgaacttgtagaacccgtattcgtcggatttgagttcgagttgtttttttgcataacgggtacggatcaacgagagacacttgcactgggcatcgtccagcgtccacccttcgtccggaaactcccggccggtagcgacacactccagcgtgtaggaagtaggggtaaaatctttcatctattgcggtttaatgattacgacatacgggacttgaaatcctcgtagccgaattctctgattatttctattgctccgtcgcggcgcacgatggcgatcgcaggatgcgccacgccgttgaacatcgtggtcttgaccatcgtatagtggatcatatcctcgaacacgatgcgatcgccgacctgcagatcgcggtcgaagatccactcgccgcagtaatccccggccagacaactgttgccgcccatacgccaccccttctctcccggttccggatcgcgggcccccagaatcgccggtttatagggcatctccaggcagtcaggcatgtggcaggcgaacgacacgtcgagcatcgccgtacgcacgccgccgttctcgacgatgtcctccacggtcgaaaccagataacccgtctgccaagtgaaggcgctgccgggctccaggatcagccgcagattcggatgtttagccttgaactcctgcaaagtgcggatcagctcgtcgcaatcgtaatccttgtgggtcatcaggtgtccgccgcccatattgagccacttgatccggtcgaggaagcggccgaaacgctcttcgacggcatcgagcgccaagcgcaaatgttcggggcgggactcgcacagcacgtggaaatgcaatccttcgaccccggcgggcagctccttcaactccccggcgggaattcccagccgcgaaccgggcacacaaggattataaagatcggtttctaccggcgaatagccggggttgatccgcaggccgcacgaaatgccgcgcagcaaagccatctgtccgaaccgttcgaactgcgccacggaattgaaggtgacgtgatcgctgcaatcgagaatcgcttcgatattccgatcggtgtaaaccggtgcataggtgtgcgccggacggccgaactcctcgaaaaccagcctcgcctcggccagcgacgaagcggtggctccgtcggaatgttgcgcaagctccgggaaaatactccacatggcacaggccttcaaagcgacgatcacttcggcaccgctctcccggcgaacgcggtcgatgaccgccaaattccgatcgagcaactgctcatccagcacaaagcagggagaaggtaatttttgaaaatcgatcatggatttccgatgctgtttcaaattcacgcaaaaatagaaaaaacctcccaaccgggattcaaaaatcccggctatttggaataaataagtatttatacctacctcttttcacaccaatacagaccgataaaaaagtccggacggtacataccatccggactttcaaaccaattatcgaaacccgatcagacttccagatcgacgtcgaatttctcgacccagggcaatccctgcggtcccagttcggccaggaacggatcaggatcgaactcctcgacgttgaacacgcccgcaccgcgccaaagccccttggcccacatcgaagcgcccagcgccgccggaacgcccgtagtaaagctcacggcctgcgtaccggtctcctggaacgccttctcgtgatcgcagttgttgtaaatataatacgtacgctccttgccgtccttgataccccggatgcggcagccgatcgaagtctggccgtgatagttcgcacccagcgacttgggatcgggcagcacggccttcaggaactgaatcggcacgatctccacaccgttgtaaatgatcggatcgatacgggccatgccgatattctgaatcacgcgcaggtgggtcaggtactcctgtccgaaagtcatccagaagcgggctcgcttgatcgtcggatagttctttaccagcgactccagctcctcgtggtagatcacataagattcgcgctcgccgatttcaggataatgaagcggcttgtgtatctcgtgcggttcggtcaccacccacttgccgttctcgtagtaacggcctttttgagtcacttcgcggatattgatttccggattgaaattcgtggcgaaagccatgccgtgattaccggcgttgcaatccacgatatcgaggtagtgaatctcgtcgaaatggtgtttagcggcataggcggtgaaaatagctgtcactcccggatcgaagccgcagcccaggatggccgtcagccccttctccttgaagcgctcctgataggcccactgccacgaatactcgaaatgcgcctcgtccttgggttcgtaattggctgtatcgaggtagttcaccccgcactccaggcaggcgtccatgatggtcagatcctggtacggcagcgccacgttcactacgatatcgggcttgaaagcccgaaacaactcgcacaaatcggctacattgtcggcatcgacctgcgcagtcttcacccggtccccgccgattgccgcagcaatggcatcacacttcgcttttgttcggctggccagcatcacgtccgaaaaaatcggattggcagcaattttctgcgccacgacggtacctacgcctcctgcgccgataatcagagctttacacataaaatttatcttgttttaagatttacgataatcaatattctgtacaaaaatatcgttttattttggcaaaacaaaaattttctatacatttgcaccaccaaaacggataactccggattggcgcggatgattccgtagctcagttggtagagcacaacacttttaatgttggggtcctgggttcgagccccagcgggatcacaaaacgctggacagaaatggacagtaaatgtacaactcctacaataccttgatattgtaggagtttttttttgtataatgtctgtgacctaagacacgaaaggtcacaaaaagacacactttcgttaccaaatcgttacccatttaagagaatgaggactttaattgattgtatctcaattagaaagtagaacttggatgtctccagatatgaaacgagatgtgtttggttattccggcgactttcgcccagtgttgcagcgtatcattcaccgttccctcgtgcgtcagcggaaagatataatcactgtcgttcgcctcgccgcgctccggcagccatttcaacgcctcgtccgaaatcggcaggtaaagcggttctttggttttctgcatcgtgatttcgatacggacacgcccgccgctccgttgtaagtcgcaccacctcaatttgcgaatgtcgcttacgcgcaacccgcacagacagctgaacagaaaagcccgcttgacgatctcgtgccggcactcggtatttatcagcgttttcaattcgtcgattgtcagatactcgcggcggctcggctcctgccgcactttacttgcgaaatcgaactctttggtcggattgacggtaatgattccctctttgtaggcacggttgatggccgttctcaaagtaccgtaataggaaacaaccgaattggcgcttaaccgccctccggttttcaatacgccgtatttgctggccttcggcatctgccgcaggtaatcggtaaactccgaaagaaactccttatcgacgtcccgaaaagcgatatagtcgccgcgaaacagcttcaatgcccggacggtattgagcaccgttcgggcatagttccggcttccctgctcggcggactgttttccgatattttccagataatcgagcaggttcactcgggacttgttcgtgttctggaatccgtgcgcgtcgttctgcacctcgacgatccgtttgctctgaatcgctttggcaagggcgagcgtcacttcgttcttcgccttgtcctcccgcgttcgttcgggaataaggtatagcttcagaaactcgtatttccgtttgccgccaacataattttccttgcggatcacgtcacccgtatagtagtccaaatagatggattgatttccgttggataactgcttgaaccggattcgcaccggctccttcaatttgaccgtctgtttctgtttcgccagacccttcccgtttgttgcttcaacggcaaatatagtgaatttgttttgttaccgcagcattttcgagtaacaaatattgggcaattatgggcttagctgagaaaattgcaaaaacatacgaaaatttccgcaatcgaatataaattactatattttaataatttatatttgatttttcatcacttttctatcctttttatatatttggtaggagttcacgaagttctgccacacgatataagcggtcggagcaatcgaggagatcgggttcagaaacgactgggccatccacacggcgagcaccgtattcttctgtcccaacgactgcccgcccgctgcggcatcaccgtaacggcgtcccagcatccgtcccactccgaactgaaccacgcagatcaccatcgcaacgagccccagtgcaatttcggtccagggttcagcattctccaggtcgatgataaaagcggtcgtgcggccaatgacaaaaaccagcgacaccagccacatataaaatgaaatctggctatgcttcgacacccagaatgccactcccggcaagaattttcggcacaactgggcacagacgaacggcagcaccagcaccggtcccacacgggagagaattgccagaaacgtggcatggtcggagcccacgaacgaaagcagcatcggagccaccaaagcgacgaccatgttgcagatcaggctgtacgtagccatcgtggttacgttggcccccaacataccgccgatcaccacggctgccatcgcaaccggagccaggacacaaatcatggccccctgcgccaacaacggatcgaaccagacgaacgacaggtaaaccactatgctgcccacgatctgaaatgccagcagccagacatgcagcatcttcacccgcatctgccgaggcttcacccgacagaaagtgaaaaacagcatcagaaagatcagcgtcggggtaatcatcccgttcgacatactctcggccgctgtcaccggacggcataacaaggctccgaccaccatacccatcggcatggcgatcgtcttgacattccgatgcagggagtgcaacagactcatttccgcggaatattgtcagctcaacaaattatttaagaaagaagctcttttactttggccgatatatccttaccatcagccatacctgccaattttttcgatgcgacacccatcaccttccccatctctttcatcgaggttgcaccgacctcggcaatgatcgaccggacagcctcggtcaactcctcaccggtcatctgtttgggcaggaacgtctgcagcacggcgacttgagccgactcttcggcagccagatcgggacggttctgttgcgcatataccacagccgactcggccccctgcttggccagcttcgcaatgatcttcagcacctcggcatcggacaattcggtgatacccgccgaagcggtcttcgcctcgataatatacttcttcacgttgcgcaacgtcgtaagacgtacggtatccttggccttcatagcctccatgattcctttggaaatttcctgttctaaagccataatattaactattttaagtctgtttatctatcttttatattcaattatccgacgccggtttcggacgccgctcgacaagcagcgacattccgattacggtaaacagcgcgttgtaggcgatcaattcgaagccgatgtggtagtcgtacttatatgcgacgaaactttgcagggcgaccgacagcaacggagccgcgaaagccaccagcggaacccagcggtcacgaatccgccgccgggtgcagatgccgaatgcgaacattcccagaataggcccgtacgtataacccgcgaccttgaaaatcaagttaatcacgctgtcattaccgaaccggccgaaaaagaggaccacgcaccccatcacgagcgccattacgacatgcaccccgatacgcacctgcgtcagccgcccttcgccccaacgcttcggaccgcgcaagatatccacggtgaacgaagtcgtcaatgccgtcatggcagccccggcagatgaataggtactcgatataagccccacaacgaacataataccaacggcaagcggcaatccaccgttcacggcgactacggcgaacagttgatcgcccttctcgggcatcggcagaccggcatgttccgcatagaggtagagcagcacgccgagcaccagaaaaagcaggatcaccgccatttggctgaaagccgtaatcacgatattgatctgcgaatcccaaggtgagcggcagctcaagttccgctgcatcatatcctgatccaaaccggtcatagcgaccagcgtgaagacacctccgaaaaacattttccaaaaataacgggccgacccggcatcctcgaaaaagaagatgcgcgacatcggcgaatcgcaaacggcctgcacgactccggccgatgtcagaccgaggctccgcatgataaagacgatgcagagcacgatactccccaccagacaacacgtatgcagaatatccgtccagacgaccgaacggacaccgccccgccaggtatagagccagaccaatccgaccaggaaagccgcattgaccgcgaacggcacgccgaacgggtcgaacaccagcacctgcagcacggtgcagacgacgtaaactttcaatgctgcggcgaacattttggatatgaaaaagaaccaggcccccgtaaggtgggtcgtcataccgaaacgtccatcgagatattcgtacagggaaacgaccttcagccggtagaaaagcggaatcagcacgaaggcgatcaccatctgcccgacggtaaagcccagcaccatttgcaggtaggaaaacgaatcggccgcaaccgaccccggcaccgacacgaaagttatgcccgacatcgccgccccgaccattgccagagccgccacataccagggattctcccggttaccggtaaaaaagcccgtgttcgacacccgccttccggcgattcccgcaacgacgaaaagcatcgcgatatacccgagcacggtgagcagtacggccgtaggagtcattgtaaatcgtaaattttccgaaaatgagtaacggacaaggccacgctcctcccgcgaatcgtcaaaatatccccgaaaggatcgacgcctgtcctacgaatgacaaagatacgaataagccgagtgcaaaaacaaattttatttgtattttgccgaggcgaagtatctaaataaaaagacagcgacacgatccggaatcacggatacgaaattcgaaaaatctgttccgacatcaggttcgacatctctttcagaaccagcgacacgaattcccacgatcccgcatcccccgaaaacccggtcagacacagaggcaaatccgatgtacggaaccgactcacggcaacacgccgtaacctattgtttcacaacgattaaaaaaatccattcgacgcctttttccgcttcgttcgaaacgatcaccggggcagaaattatttattaaaaatttttgcacaaaatttggaaattcaaatttgttcactatatttgttattcgaataacaatacggcccttctccgaagaaaaacggagcgagcccaaaggaagggaaataaccattaaaaattcaatacaatggccaaatcattaaaaatcagagatcttacgttgcgtgacggccaacagtcgtctttcgctacacgaatgaaccaggcccaaatcgaccgctgccttcctttctacaaggatgcgaacttttacgccatggaagtttggggcggcgcagtgcccgactcggtaatgcgctacctgaatgaaaatccctggacccgcctggaaaccattcacaaggcaatcggaaacgtatcgaagctcacggccctttcgcgcggccgcaacctcttcggttacgccccctatacggacgagatcatcgacggcttctgccgtaattcgattcagagcggcttgggcatcatgcgtatcttcgatgccctgaacgacgtgaacaacgtcaaatcgaccgtaaaatacgtgaagcaatacggcggtatcgccgattgtgctgtgtgctatacggtagatccgaaatatccggaaatcgggttcttcggcaaattgatgggcaagaagaacccgaagccggtatttacggacgaatacttcctctcgaaagccaagcaaatggaggcgctgggagccgatatgatcacgatcaaggatatgtcgggtctgatcccgccccaccgcgtgagcaaactggtgaaactcttcaagcagaatctgaatgtccccatcgatttccacacccactgcaccccgggctacggtctggcatcggtgctggcggcgatcgtcgcaggagtcgatatcgtcgataccaactgctggtacttcagcggcggtacgggagcgccggctatcgagttgatctacgtcttctgcaagaaactggggatcgacacgggtgtcaacatggaagccgttgccaagatcaacacccagctcaaggagatccgcaaagagctcgaaatttcggtcttcggcaaagagaagcctatgccgaagcctttcaatccgctcaccgacgaacttccgaaggagatcgacgccgaattcgaccgtgcgatcaaagcagcgcaggcggacgacgaagagacgctgctcgacgcctgccacaagatcgaggcccatttcggattcccggcaccgaacgaactggtcaagaaggccgaaatcccgggcggcatgtactccaacatggtggcacagctccagcagctcaaggccgaggagattctgccccgcgccatggagttgatcccgactgtacgtctggccgcaggtctgccgccgctggtgacccctacctcgcagatcgtgggtgcccaggccgtaagctgcgcattggacgaaaaggccggacggccgatgtacacgaccaagagttcgcaattcgttgctctcgtaaagggcgaatacggtgaaacgccggtgaagatcgaccccgaattccggttcaagatctgcggtgtacgcgaagagattccctacgatacgtcgaaataccagatgcagcccaatcccgaactgcccgaagcaggaggcgtaaagctcgctgccaatgaaaaagaggtgcttctgctcgagctcttcccgatggttgccaagacattcctcaccgaccagaagaagaaagcctacgaagcgacggcagccaaagacactccgaaaactgccgcccggagcgaacacaaggtcgaagccaaagccatcacgggccacaaggtgaccgctcccctgccgggcaagatcatcgccctgaaggtgaaggtcggcgacaaggtaaaagccggacaggaagtggttatcctcgaagcgatgaagatggaaaactcgatcaccagcgacgtggcgggtacgatcaagcagattctcgtacaggaaggcgacaacgtcgcaaccgatgccatcctggtggaagtggaagaatagctcctttccggaaatatcatccgaccggtcccgaaaaatcaacgggaccggtttttctttttgcaaataaatagtatctttgatttcttcgcctcggcaaaatgcaaataaaatttgcttttgcactcggcttattcgtaatctttgacttcgtcttagatacttcgcctcggcaaaatgcaaataaaatttgcttttgcactcggcttattcgtaatctttgacttcgtcttagatacttcgcctcggcaaaatgcaaataaaatttgcttttgcactcggcttattcgtatctttgtatattatcgtattgcatttgccacaattaaccttaaaaatcaacgtatatgtcttttttcaaagaatttcgggaatttgccctcaagggcaacgtaatggacatggctgtcggcgtaatcatcggcggtgcgttcggaaaaatcgtttcatcgctagtcaacgacatcctgatgccgcccatcggcgccctcatcggcaatacggacttctcgtcgctgcggctcgacatcagcaaggtgcgcgacctctcctcgaaagcgacacacgtagtgaccgacgcaatcgggtcgggtacggcggagagtgttcctgcggaaccgatctggtggaattacggcgcattcatccaacagtgcgtggatttcgctatcctggccttctgcgtctttctgatggtcaagatgatgaacaagctgatgaagaaaaaacaggaagccgcgccggcaccggtgccggaaccgtccaaggaggagttgttgcttacggagattcgggacctgctccgggaacaaaaaaaataatccgtccgaaagcggatcccatgcgcaaagtccgactccgatcaagagtcggactttctgttgcgcgtataaatctgagtgacatacaccgtgaaaatcgggaacatcatcatccccaacgtaggtagcaataccgtcagtatcttaccgatggctgttacggcaaagatgttggcaccgacggtcgtgagattcatgctggcccaccagatcgcatcgccgaaatcgtgcagagccggattgacttcaatctcgtagtcgtaaaagatcaaagcggcaaaataggtgaacaccaacatcgacaggacgtaggtggtaagcagtcgcgtaacccggttgttgatgatccaggtgaaaagcacgtacagccccagcaatgcccgcaagagcggtacgagccccatcaacatcgcctccgcatgcgtaagttcgacccccatccaatcaacgatattcagatacggaacagaaaggaggaaaaaatagagattacggaagaaaaaacgccagcggtgatcggccatcagcatccggacaaagaaatcggccaggaaaatcacgcaaacgaccccttgcaacaacaggtaatccgtcgaataatgccgcgggtcccccaggagaatctcccacgaaacggccacgagcagagatgctccggccaggagggacaagacattgagtatcttgagcggcagaggttgaaagtcggaagtcttcgcttgcaccatatacgattctcattttacttccctttacccgtcaaaatcaatgccatacgattcaacatgcattttcaggacatatttttcggagaaagatttggtccgttcaactttttggtttatatttgcactcgctttgaaacggaaagctatggcgagatagctcagctggttagagcgcatgattcataatcatgaggtcgagagttcaagtctctctctcgctacaaacgatgaagaaaccccacagtcaggcaactcttgaagagttgcctgactttctttttaccaagtgaaagcctgacaagtcaaaaattccaattgcagcgagccgttcaaaaaattcccacttcgaacacaaaaataagcgcagaagacacaactttacaatttttgtccccttgtacttcaccctatcgctccgatttaggtacgagcaaaatcacatccagcacatcgcccggagccgcagcctggtaacgccacacgagccgccccgcctgctcctgcacgacctcgccgatcggctgccaccggttttcctcgcgtgcgaatttcttatccagcggtccgggaatccacttgaacacttcataccgaccttcggccacatcgggaaaaacgaacgatacggaggcccctttccgctccgcgaccagataggaaccgccgaaaaactgacggtccttcgccgtgcggcgcaaccatttgccccgccccttcatccgctccgaatcagcctgccgtcgctcgctgccgcccaaatcgagcaggtcgctcaaggccaacagcgacgcatgtgccaattcagccaaactctcccgggaaacccattcccctgccggatcgttattataataagtatagggcgtttcgaacgtcacggccagcgttttctcgccgaagcgctgccagaaccaaccctcggcataccggggagcagcttccgaaaaacgctggtcgatgggacggtaatacggcgtatgggcgaccgtcagggccgacagcagcatcttgcgtcgatacatttttgcagaggtcgatttcgccgtatgaatccagtacgtcacgaacggcgcactctgggagtgaagattcaacgctacgtcgaaaggacgctctgtcgaaagactgtcgatcgtgcgtttcaggaccctcacttcaggctgtgtcagggagtcgggccgatcccagttgatttcaagattgacaccttgcgccgtggaacgggaataaccgccccgaacaccgtcaggattggtctcgggaaccacgtagaaaaccgtgcggcgcaaaatctcccgcgaaagaggcgcatcggaaagcagttcgtcgatcattgcctcgagataccatgcagcaggtgcttcgctggtatgcacacgggagtgaatccacacccggcgcttgaggctgtccggaacagtggcatccgtgaggatctgcatttcgatcggacgtccttctccgctccggccgatccgctgacgtcgcacgaaaggcgaacatgcccactcgtcggctttggctttatgtcgggcatgactgtaaggcaggaaataagcgacataaaccgtgtcgtgcaggaaatatttatagactgtctgcggcagcgaacattcacctgcatcgaagcgcaggtattcctccccgtcgtacgaataaaacggccgcaccatctcggtattgggaatacgcagaaacatcagctttcccttcaccccttccaggcgaaaatggaaccagcggctgctgggcagaagggccgtatcgacgggattgagtgggtcgatgcgcgaccgtattccgaagctcatcacctccagcgaatttttcgcggcatgaagcatccgcaccgaatcgatccggcggaccgacccgatgctgcccgtatcgaaatcggcagagatggttacctgcgccgcaacatttccccaaacgcccggtagtgcgacggccaataggacaatttttatccacaacgccttcataaacgaaaatttatgatttcggctccgagccgggagcgcccgtttcacaacagcattttccgcaactcatcgcagctccgctgcgcttcgcggtgacggaacagaaaagtcgaaataccgaatgtacgggcggcttcgagattcaccggacggtcgtcgataaaaagggtttcggccggatcgagcgaataacgatcgagcagacgacggtagatctccggctcgggcttcacgacctgctcttcgcaggagatgacctccccgtcgaaacagcggtaaaccggcatcttgcgcaggaagtcgatgaactcccgcgacatgttcgacagcacatataacttataaccgacccgtttcaggtcgccgaccaacgcacgggtttcgacgatctcctcctgccggtcgatcgcatcccgaataaaacgggccgtgacccgctcatcgcacgccttttcccggctcaatatacggacgacctcatcgagcgtaagggtgccccggtcgtaatccacccaaaattccggcattttctccgcatggatgaacgcgaagaactccataaattccggctcccacttacgtggatcgcgcccgaaaaccacacctcccagatcaaatacgatatttttcatacggcaaagatagtgaaaggtgagtgcaatcgtgcgggcttgcacgcaaagattgccgaaccgcctcctatcttctgcaaagatagtgaaaaccgagagaaaacgggaacttgtttacagttttccgaggcgcaacctacgtaaaatcgtacaaggcacgggcaaattaaaatatcgcttccgaacaaaacaaccttttcatctaattttttagtagatttatttgcacatctaaaattttagtactaaatttgtagtaaaccaataaaaacacaatgaaaacagacaataccaccctcaaaaaactgacacgcggcgaagaagaggtcatgcagatcctctggcaactgggcgcaggttccatcaatgatctcatcgccgcaatgcaggagcccaaaccgaaatatacgaccatcgccactttcgtcaaaatactcgagaacaaaggctacgtcggacgtacggaacggggcaaaagttacgaatactacccgctcgttcccaaagaagagtacgccaagacagttgtttcttcgatattgaactcctacttcgacgggtcgttggcccaaatggtttctttcttctcccggcgagaagacctttcgatacaagaaaccgaacaaatcctcgccatcatccggcaagcccgacataaaaccgacaagtcatgaaagagatcgtccgatacatcctcgaaacagtcgtttgcagcggcatactgtacggcgcatacctgctgtttctgcgcaatcgcacagggtacctcgcagcacggctctgcctcacggggtcgctcctcgcggcggctctcattcccttgctccgaattccggtctggccgggcaaggtgatttacgccaccgcaggcactcccgccgaaaccaccttcaccgccccctccgtttccgccgccgcgttcgattacgaggcagcgatatggatcgtgtacggttgcggagtactccttctactctcttccatgttccggcaagcgcttctgatccgacgcctgcgacgacacagtacacaggaacgaatcggacgtatcgtattggtacgccctaccgctcaaatcgcatcgttctccttcttccgcacgatttatatcagccgctccgtcgcagaaaaagacattgcggcgatcttcgcccacgaaaagagtcacgtcatccaccgccattcgctcgaacggatcgttatggagagcctgaaagccctgctgtggtggaatcctttcgcgtggctcgcagcacgcgcacttaccgaagtggaagagttcgaagccgaccgcgacgtactcgccgaggggcacgacacaggaaattatctgaaaaccatcttcacgcagcagttcggttacagtccggacgtagccgacagtctgtccaattcattaaccaattcattaacaaaaaaacgaatccaaatgatgacaacgcctatgaagagcagatacgctctgctccgcctgatcgcaatgctccccatcgtcaccggcctgctggcagctttcggattcacctccaaagcggcagaaatccgcatccaggacaaattgccgtcagcttacaccccgaccgacccgccagcggaaaccgccaaaaaaaccgcctccccggaaaacgaagactacgacctactgctggtagtcgatggggaagtcaccgatttcaagacggatcccgtcaccggcctgcgctctcttacacttcccagtggtacctatagcatcgtaggaacagaggatctcacgcccaaaatgcgcgagaaatacgccgcctatctccccggaaaggccgccgtctttttttacaaaaaagacacgacagggaaagcttcgaaagtccaaatacgggtgaaaccgcttactcccagaccgccgtctgcaatgccacgctcgcactcgaacagacagagcagatgccctcattccagagcggagatatgaaggctttccacaactgggtaaacagtcagatccgttatccggcggaggctttcaaaaataacctcggcgggaaagtcgtagcacaattcactgtcgatcaagccggcagcgtcggcgacataaagattttgcagtccccggataaatgcttcagcgatgaagtgacccggatactggaatcctcgccgaaatggacaccgggccgcgacgaaaaaggtgacgccgtaaaggtcagtctcgtcattcccgtcgatttccgaatgaccgcagaaaagccttcgggaaattaacaggactctttacaacccccgcaggacaagaatccctgaattggccgggaattttccgatccatacccttgtcaagcagcttctaccgacaaaaaagaggttacggtttacaccgtaacctctttttacatcagaatatagacctctatcagctgccgaaattatcgtaaagaatattctcggagggcacgcccaggctgtcgagcatcttcaccaccgacgaaatcatcatcggaggaccgcacatgaggtaaatattgtcctcgggagcctgatggttcttcaggtaattctcatacagcacgttgtgcacgaatccgggcgtatatttcactccggcggcatccgcctggggatccggacggtcgagcgccagatggaacttgaaattcgggaactcccgctggatttcgaggaactcatccatatacggcacctccttgagcgcgcgggcgccgtaccagaacgatacgggacgcgaagtcttctcggtcttgaacaggtgcatgatgtggctgcgcatcggtgccatacctgcaccgccgccgatgaataccagctcctgcgtcgcgggcaggttgtcaggcaggaagaactcgccgtaaggacccgaaatcgtcaccttgtcgcccggcttgcgggagaagatgtacgacgagcagataccgggattcaccttggcgaaggtacccgtagcccggtcgaacggaggcgtggcgatacggatgttgagcatgataatattgccctcggccggatggttggccatcgaataggcccggaacgtaggttcgggattcttggtcaccagatcccacatcttcatcttgtcccaatcctcgcggtaaggctcttcgatgtccatgtcggagaatttgatggcatcgtacttcggaatgtcgatctggatatagccgccgctgcggaacttgaggttctcgccttcgggcaatttcaccacgaactccttgaggaaggtcgagatattgcggttcgagatcacttcacactcccacttcttgacgcccagcaccgactccggcacgtggatcttgagattttccttaactttcacctgacagcccaagcgccagtgctccttggccatcttgcggttgataaagcccgtttcggtcggcagcagttcgccgccgccctccagcacctgacatttgcacatgccgcacgaaccgccgccgccgcatgccgacggcaggaacacgttgttgttggccagcgtcgaaagcagcgtgccgccgctctcggcgatgagcactttctccccgccgttgatgtcgatggtgacatcgcccgaggtggtcagtttcgccttcgcaaagagaagcaaccccacgagtgccagggttatcaccagaaaggcaacgatcgctatgataattgttaacgtcatctttttatctcttttaaaggattacaacttgatacccgagaagatcatgaacgcgatacccatcaaacccgtgatgatgaatgcgataccgggaccccggagtgcagcgggaatctgcgagtaggtcgtcttctcgcgaatggcggccatcatcacgatcgccagccaccagcccagaccggaacccagaccatagacgatcgactgccagagcgaagtgatctccagcgcatcgaccttttgctgcatgaagagcgaaccgcccagaatggcgcagttcacggcgatcagcggcaggaagatacccaactgattataaagcgtcggcgagaatttctcgacggccatctccacgagctgcacgaaagcggcgatcgtggcgataaagacgatgaaagtcaaaaagctcaaatcgactcccgggaccaatacatcggctttgaggacgtattcgtacaaaaggtagttcagaggcacggtcatcaccatcacgaacgtaacggccagacccaggccgagggccgtcttgacgctcttcgatacggcgatgtaggaacacatgccgaagaagaaggcgaagaccatgttgtcgataaagatcgaccggataaagatattcaatgattccatacgttaccctcctatttttcctgtaaatccttgttgtgagaacgatgtacccagatgatgcaccctacgatgatcagcgccatcggcggaaagagcatcagaccgttgttggaataaccgccgccgttggcgatgtaccagctttcgggaacgatctggtagccgagcagcgttcccgaaccgaacagttcgcggaagaaggccacgatcaccaaaatcataccgtagcccagaccgttgccgataccgtcgaggaatgcgggccagggcttgttgcccagagcgaatgcctccacacgacccatcacgatacagttggtgataatcagaccgacatagacggaaagctgtttggacacttcatagacgtatgccttcagtatctggtccacgagaatcaccagcgcggcgatcacaaccagctgaacgataatacggatacgcgaaggcacgcccttgcgcaggcaagacatcaccatactcgaaaaaccggtcacgacggccaccgagagggccattacgatcgccggcttcatctgcacggttaccgccagggccgagcagatacccaggatctgcacgatgacggggttgttcgcagagaacggactggtcaggtatttcaaattcttagccgagaagatcgactccttttcattactcatggctctcgtttacgttttgctggttagacacttccgaacttgcagcctcgttcgcggcagcgggtgccgactgtgctgcggcctgatgctgactttcgaagtaaggcaggtaagccgacaggcaatcgcggagcatggccgtcacgccgtccgaggttttcgtaccgcccgaaataccatctacctcgtgctcgggatctttcgcaccgcccttgcgcaggctgaccgatacgaactcgccgctcttgaacagcttcttgccggcgaaatgcgcctggaacttaggcgtggcgatctcggcaccgaggcccggggtttcgcccttgtgggccatgacgatacccgacacggtatccatatccttttcgagcgccacatacccccagatatcgccccaaagacccataccgatcagcggaatgacgacgcgaccgtcttcggtctgaaacagaataagacgcttggcatcgtaattatcgcggatattctggttggtggcgagcatcgcgaagacctccttggagggagtttcggttttcacgccgtcggcatcgaggacgaaggatttgacctggttgtcgaaatcggccagcgcccggtcgaactcctgcggattttcgtcggggctgtacccgagcgactggagaatattgctcttcttctcctgcaactcgttctccgcctgacgcttttgcaacgagagcgaagccacggccagcagagtcgccacgatgacgaccatgaccgtagaatagacgatgatataagtgttgctgttgggattgtgcatccagccctttttccggccggaccgatcctccgtaaatgccgacgaggaagcctggcagacggggcaggtatcgggtgcggagttaccttcgtggacatgtccgcaaatgctgcatacgaattttttctttgccatatctcccctattttaccaatttaacacgtttcttccggcgcgagatgctggactcgaccacgcagtagtccaccagcggagccaatgcgttcatgaagaggatcgcaagcatcataccttcgggataggccggattgaccacacggatcaacacggcgagcgcaccggtgaggaatccgacgatatactggcccgtacgggtctgggccgacgtgacgggatcggtggccatgaacacggcgccgaaagcgaaaccgccgacgatcagatgctcccaagcggggtaggtcgtcacgccgagtgcctggaaaaagtatcccattgccaggccgccgataaagacgaacgacatcgtgcgccacgaagcgacgcccgtaaagagcagaatcgctgcgccgatcagaatcgccagcgtcgaagtttcgcccacgcagccgggaatgaatcccaggaaagcgtccgccgtcgaataactcatcgcaccgctcgtagcgagttgttcgagggccgtagcacccgagacagcgtcgtcggcgaaccaaaccttctcacccgaaataaagggcgtgtaggcgaaaaacacgaatgcacgcgccaccagcgcgggattgaagacattcatacccgtaccgccgaagacctccttgccgaagatgacggcgaaagccgtacccagcgcgatcatccaaagcggcgtaccgaccggcataatcatcgggatcagcagacccgacacgagaaaaccttcattgacttcgtgtccgcgcttctgggcaaaaaagaactcgatgcccagaccgaccacgtaggaaaccacgatcatcggcagcacctcgaggaaaccgaaccaaaaggctgcccagccggtcatgcccacctggtagcccgtattgtacataccgaacaacaaggccggcatcagcgccacgaccaccacgatcatcgtacgcttcatatcgttgcaatcacggatatgggctcctctgctcgtggtcgtattcggcacgaaaaggaacgtttcgaacgcatcgaaggtcgatgcgaggaacgaaagcttgccgccttcggagaaggtcggcttgattttatctacgaattttcttaaacctcccatcgttatgcctccttgatcattaagttaataccgtcccggatgatctgctgcatctcgatcttcgagggatcgacaaattcgcaaagcgcgaaatcctcctcgacgacctcgtagatgccgaggttctccatcttgtcgatgtcgcccgcaagaatcgccttgagcaggtaggtgggatagatgtccatcggcaggtacttatcgtacagtcccgtcaccacaaacgggcgctcgccgccgttgagattggtatccaggtcgtaaaccttcttcgggcagagccatgaaaaataggccctggaaaccgaaaacttattcagacggggcatcgcccaacccagcaattcatagtggttgccttcgggaattaccgtcaccatattggcgtaaaaaccgatgaaaccgtcggccggggtcttgcggcccgtaagcacgttgcccgaaatgatgcggggattgtgggccgtgggcttcaggttgtccttgagcaccgaagccaccggagcaccgtcgataagccgatagtactggggatttttcacctcggagcctgcgaccgcgatgactttggttctatcgacgcgcccttcgttcagcaggcggccgatgatggccagatcctgaatattcaccgtccatacccgctcgtccttgttgatcggatcgacgtgatgaatctgaacgcctacattacctaccggatgcttgcctgcaaacgtgtggatttcagcccccttcagaaatgccatttcgccctccgcaccggcacgcacgcccagatggaccttgcccgaagtgagcttgcgcatcgcttcgatacccgtttcgaggttccgcttctcaccggccagcacgaaattgtaatccggagccagcggtgcggaatcgaacgtcgaaacgaaaacggccttcggtgtgtcgctcggatcggcgatgataccgtaaggccgctggataatcatgggccaaagcccggacttgagcaaaagatcgataatctcttcgcgggaagcggtttgcacgttcagcttggcaaactcttcgtacgtctgggtcgcatcggcctgaaccgtcacgttgagaatgcaacgcttctcaccgcgattgatcgccgaaaccgtaccgctgacgggcgaggtgaaaaccaccctttcgttgtacttgttgaagaacaacggggtacccgccttgacccggtcgccggctttcaccagcaacttgggcgtcacaccctcgaaatcgagaggcgacacggcgtactcgggagcgagcggcaatttgaccagcttctccacggccttaccctgaagattgatgtcgagacctttgcgtaatgtaatgattttcgacatgattaataaatggttgttttacagataattattttgcattgagatttccaggcaatgtttgttagcgtaataacacaccaaatcgcgtgcgaagatacgattttttccgatacgaacagcaaagaacagcctgattttttttaatcgactgaaaaatcataactttgtcttttcagagcgatccgcattatgaaatgcagcatagtcgatatccacacgcaccgtcccaccggcaaggctttggagccctctttcgcagggattcatccctggcaggcggaaacacggcgaatcgaagagatcgtcccccggttcggcgaagtcgatctggtcggcgagatcggcctggactatgccggcacggtcggccgggaggcccagctccggattttccgcgaacagctcgactgggccgaacggctcggcaaaccggtcgtgctgcactgcgtgaaggccttcgaagcggtcatgcgcgaactggctccccatgcactgcgggcggtgatcttccacggcttcatcggatcgtcccagcaggcggccgaagccataaagaagggttactacctctccttcggggagcggacgttccgctcaccccgcacggtcgaagccctgcggcgcacgccggtcgaaaacctcttcgccgaaacggacgaaagcgacgtgccgatcgaggagatttaccgccgaatcgcccaagcgaaagacctcgaccctgaactgttgaaatgcgcgatataccgcaattacagagagatattcgaacgatgactgacaactggctcgaaagaacggagctcctgctgggagcggaaaaactcgaaaaactgcgtgcggcccacgtgctggtcgtaggattgggcggcgtgggcgcctatgccgccgagatgatcgtccgggcaggcgtggggcgcatgaccgtcgccgatgccgacacggtcaatccgaccaatatcaaccgccagctggtggccctccactcgaccgtcggacggcccaaagccgaggtgctggccgagcggctgcgggacatcaacccgacactcgaactccacgtagtcgataaatacatcaaggacgaagaaaccgacctgttgctcgactcggcacggttcgactacgcggtcgatgcgatcgacaccctctcgcccaagctggcgctgatcctgggggcgctgaaacgcggcattcccctggtcagctcgatgggcgccggagccaaaaccgaccccacgcggctcgaaatcgaggacatctcccgcacccaccactgcccgctggcccacatgctgcgcaaacggcttcacaaagccggagtacgcagcggcttcaaagccgtattctccgccgaaccggtacgcgaaggcgcgacgatcctctgcgaagaacagaacaagaaatccaacacgggcacgatctcctacctgcccgccctcttcggcataggctgcgcctcggtagtcgtccggggagtgatcggagagctgtaagcggaccgcaacagccgtcccgcgtacaagaaaaccgctcaaacggctgtcggaacggatttatgaccatccagaagcggttagatccgtttttcgaaatattattatctttgacatagcctcggttaaataggctgcgcctcggaaaacgggaacaattcccgttttctctcggcttttagtatctttgtttttaagatatgaatcggacaaactcaaccaagtttggcttagtgtccatcttttcgtatctttgacttcgtcttagatactccgcctcggcaaaatgcaaataaaaattgcttttgcgctcggcttattcgtatctttgcaaaacagcggcgaacgatgcgaacaagcatagccgaggcagctccgtaatccgccggtcacgacagatggacgatacagtccgcaaacgagatcgcccgtgtccggtccggagacaagcccgccggctgcgacgcggaacctacgactgttccgtcgaggccccggcaatcccgatccgtaccggaaactgcggaaacacctccgtttcccgtacccggtaccaccacggatccgcagacaatggtacaaaaaatgatggtcttattcggcgaggcccctgcttcggcggatgcacataccgaaacaagacccgaaataaaaccgcaactatgaatatcgtatttttagatgagtacagcctgggaggaatcgacctctcccgcatcaagcaactgggaaattataccggctacgaaaaaacgacgcccggtgaaatagccgagcgttgtatcgacgcagacatcgtcatcaccaacaaggtccccctgcgggccgaagctatcaaggtgctgccgcagctcaaactgatctgcatcgccgctaccggtatgaacaacgtcgatctggaagccgccgccgaacgcgggattgaggtccgcaacgctgtcggctactccacccatgcggtgacggaaacgacgatcggtgccgccatcgccctgctgcggcagagcatctactacgaccgctacgtcaagagcggcgaatacgccgcatccgacgctccgttccatttcggacggccgctccaccagctctacggcaaacgctggggtatcatcggcctgggagccatcgggcacaaggtcgccgaagtcgccgcagccctcggctgccagatcgcctatacttcgacttcgggtgtcgaacggcaggaaccctaccccgccatgccgctcgacgaactgctccgctggtcggacatcgtgtcgatccacgctcccttgaacgaccgcacgcgcggcctcgtcggagcccgggaattggccctgatgaaaccttcggccctattgatcaacgtagcccgaggtggcatcgtcgatgagcaggccctcgccgatgcgctcgacaacaagcggctggccggtgccggaatcgatgtcttctcgcgcgagccgatgtcgccggacaaccccctgctgcgtgtaacagaccccgaccggttgctgctctcgccccacacggcctgggccccggtcgaagcactcgaaacattggtcggctgcatcgaacggaatatcgaaacctttttagccgaacagcgatagtaagacgccgccgaagcgaccgaatgagaaaaccccggactgaacttaagttcagtccggggttttcttcgatttttctgttatgaatcaaacaattccgatgcgcaccggtccgcgagccctggcagcctcgtaatccgcatcggtaaatgtataagtccattccacgacgtatttatccccctcttcataagccttgtaaacataacgatcgggatcctgcaaacttttcggaaccgcaacttctccgagtcccgacggataataattttccatataacagtaaattataactccttctgtaaaagaatcgtagataacatgagtttctcttccgtcgagaaaagtctgcaaatccacgggcgaaggtccttccaattcttttacagcccgctctccatactttattccctgggatctcgtgatgcacccctctacatagaaatattcgatcctatgattgcacctattctcccacacgaaccggctgacataggacgaataggttttatcgtcgctgtcattgcaacttacaagagagcacagcacgacgcaaatcatccacaaataaagaatctttctcataatttaaattcaggctgatttgacttcattataaaagtaatagataatattcgaaaatacaacttcgtttcttgaatcttttaagaaaattcccggaaatcgaatccgacttccgggaagaatcaaatgcctgatattcctaaaaattaaatttccccaagcgtaatatgcaccgcaccccgggctttcgccgcctcgtaatcggcattggtgaaagtataaacccaaaccaaagccagactaccgtttttctccttatttaccaaagtatagcgctgcacgtcctgcaaaccctttggcacagcggaattacccgaccccgacgggtcgtagttttccatatatgcatacgtttcgccatcgacgacaaactgctcataccacagccccatctttcggtcctcaatatagtccgacaaaccttccggtgagccggacacccgcacggaaacatactttccacgattaatcccgtcatgccaccgataccctccttctacataaaagaaatcgattcgataatcgctctcatttttccattcgatccaatattcatcgaccggttcgacctgcttctcgtcgtcgccacaaccgctcgaaaagatcaatgccgaaagcgccgcaacgcaacagataaattttttcataaaccttaaattaaaattcgaagaagatacccacaacaaacagttacgaagaatacaaaatattcgggaataaatcctcccgaatcctctaaaaaagatttgcgttgaaaaacagatgtttttcaacgcaaatcaaaatcgatataaaatccactctatacctataagagttcccctacttaaattccaccagcgaatgtcctgtcatggcttcgggcttttcgagccccatcaggtcgaggaccgtaggcgctacgtcggccaggataccgtcgcggaccgttttcacgcggtcggaaaccacgacgatcggcaccggattgagcgaatgggccgtattgggcgtgccgtcggcattgaccgcattgtcggcgttgccgtgatcggcgatctgcacgacctcgtacccgttgcgaagggccgcctcgacgactttggccacgcacgcatcgacagccttcaccgctttctcgatcgcctcataaactcccgtatgccccaccatatcgccgttggcgaaattcaggcagatgaaatcgtatttctgcctgtcgagtgccccgaccagcttgtcggccacctcgtaagcgctcatctcgggctgaaggtcgtaagtcgccaccttcggagaagcgaccagaatgcggtcctcgccctcgaactcctcctcgcggcctccgttcaggaagaaggtcacatgagcgtatttctccgtttcggcgatacggagctgcgaaagcccctgccgggcgacatactcgccaatcgtgtcggccacgttctccttgtcgaacaggatatgcagcccctcgaacttggcgtcatagggggtcatgcagcaatagtagagcggcagcgtgtgcatgccctgctgcggcatatcctcctgtgtgagtacgatggtcagctccttggcccggtcgttccggtagttgaagaagatcaccacgtcgttcggccggatcataccgatcggattgccgtcctcgtcgatccgcacgacgggcttcacgaactcgtcggtcaccccttcgtcgtacgacttctgcatcgccagcgccatatcggacgaatgttcgcccttgccctcgaccaacaggtcgtaggccaccttcacacgctcccaacgcttgtcgcggtccatcgcgtaataacggcctacgatcgaggccacgacgcccgtcgatcgttcccgcatgtgcttttccagccgttcgatgaatcccttgccgctgtacggatcggtatcgcggccgtccataaagcaatgcacgtaggtacgttcgataccgtatttatcggcgatgtccgtcaatttgagcaggtgatccagcgacgagtgcaccccgccgtccgaaaccaatcccatcaggtgcacgctcaccccgttcgatttggcgtattcgaacgccttcacgatttcgggattcttcagaatcgaatcgtcgcggcaggcccggttgatcttcaccaaatcctgatagaccacccgccccgcaccgatattgaggtgccccacctccgaattgcccatctgcccatcgggcaggccgacgttttcgccgtccgtacgcaactgcgcatgagggtatttacgggtcatttccgaaatataggcaggatgcacctgtgcgatgacatcccccttctgtccgtcgccgatgccccaaccgtcgaggatcatcagcaatactttgcgattactcatccgaaacattactttacttgttccacaatcagttctacggccttgtcgatagccgcctggatgccatcggggttcttaccgcccgccgtcgccaggaaaggctgtccgccgccgccgccgttgatggctttggccgcctcgcgcaccacgacaccggcattgactccctgcgccacgatatcgtcgcccaaagcgacggtgagcgtcggcttgccgtcattgatcgatccgatcaccagtacgatattcttcgaacgcgaacgcacggcgaaagcgaggtccttgatgaaatccggccggcgatcggtctgcgtagccatcagccgcatcccgccacgctcgggcgtagaatcgacgatcttcgcggcccactcggccacctgttcgcggcggatggcctccatctcgtgcttcaaagcctcgttgctttccatgatcttcttgatcgactgaagaatctgcgggttattgagataatcggccacgttgcgcatcgtatcttcggccgcatagatcacctcctcggccttcgcccccgtcgtggcctcgatacgtcgtacaccggcggaaatggcgctttcgttcaggatcttgaagaacccgatattacccgtagcgctcacgtgagtaccgccgcacaactcgaccgaggtgccgaagcgcaccatacgcacccggtcgccgtatttctcgccgaagagcatcatcgccccggccgctgcagcctcttccttggtggcatcgcgtttctcctcgaggggatagttcgcgcgaatggcacgattgaccagttgctcgacccggcgcagctcctcgtgcgtcaccttctggaagtgcgaaaagtcgaagcgcaggtattcgggcgtcacgagcgaacctttctgctcgacgtgcgtaccgagcaccttgcgcagcgcttcatgcatcagatgggtcgccgtatggttgttggcagccgcctgacgtttctccggatccacgacggccatgaaggtcgcctcgggattttcgggcagttgggtaacgatatggataatcaggccgttctccttctcggtagccacgaccgggatccgttcgttggcggtttcgatatagccgatatcgccgatctgaccgccggaattgccgtagaacggagtgcggtcgaacaccaactggtaggaaacgcgtcctttggaggacacacggcggtagcgggcgatcttcacctcggcgctcagcgtgtcgtaaccgatgaactcgctctgcttgatatggatcagctccttccagtcgtcggtatcgaccgcagcagcgttgcgcgaacgctccttctgcgcctgcagctccttctcgaaggcctccagatccacctcgatcccctgttcgcgggcgatcagctccgtcaggtcgatcgggaatccgtaggtatcgtacaacaggaaagcgtccttgccggaaatgcgttcgccgccgctcttgcgaacctcggccatcacgccgtccaacaggttgatgcccgtagcgagcgtacgcaggaaggagctttcctcctcctcgatcaccttctcgatcagcgtctgctgggccttgagctcggggaactgcccgcccatctgatcgaccagaccggccaccagacggcagatgaagggctcgttgaagcccaggtaggtatagccgtagcggacggcgcggcgcagaatgcggcggatcacgtagcccgccttcacgttcgaaggaagctgtccgtcggcgatcgagaacgaaatggcacgcaggtggtcggcgaccacgcgcatagccacgtcgcacttctcatccgcaccgtacgttttgccagacatggcggcgatgcgctggatcgtaggttggaacacgtcggtatcgtaattcgactttttcccttgcagaatcatgcagaggcgttcgaaacccatgcccgtatcgatacagttggccgccaggggttcgagcgaaccgttcgccttgcggttgaactgcatgaagaccaggttccagatctcgatcaccagcgggctgccctgattgaccatctcgcggcccggcacggcggcgatctccgactcgtcgcgcaggtcgtagtggatctcgctgcaaggtccgcaagggcctacgtcgcccatctcccagaagttgtcgtgcttgttgccgcggatgatgtgatccgcaggcaggtattgcagccagatgtcgtaggcctcctggtcgaacggcaccccgtcttcgggacttccctcgaacacggtagcgtacatgcggctcttgtccagtccgtacaccccggtcagcagctcccaggcccagccgatcgcctccttcttgaaatagtcgccgaacgaccagttgcccagcatctcgaacatcgtgtgatggtaggtgtcatggccgacctcctccaggtcgttgtgcttgcccgacacgcgcaggcacttctgcgtatcggcggcccggggatagggacggggaatattcccgaggaaaatgtccttgaactggttcatacccgcgttggtgaacatcaacgtcgggtcgtttttcaccaccatcggtgccgacggtacgatcacatggtccttccctgcgaagaaatcgaggaaagcctgacgaattttgttggattccatatactgtgttttcaattctttgcgttgttcataagacacactccgcagattccggctgcctgtgctcaggctgtcatccgctcgaatccgcgaaacttaaagaagttacaagattgcaaaattacatattttaccttaattttgcatcacttccaaggagtttttcagatcatggcacgaaaaaagcagacgttcgatccccacgccctgacccgtgaggtggtttcggccactcatgaggtggtcacggtcccgttccgcctgcgcacctaccgtgtcattcgcaaaatcctcatcatcttcatcgcagtatcgatcgtcaatgtcgtcttcgcaaatgtcttctacacgccgaaaatgtaccgcatcctgcgcgaaaattcggagctggtcttcaaataccggctccttcaggacaagatccgcgcggagcagcgtaaactggacgaaatacaccaccgcgacaacttcgtttaccgggctttgttctcggccgacaccctgaatatcggagggatctacaccccctatccggcgtccaaatacgcggctctggcgggcgacgaatacgccccgctgatgatcggcacgtggcagcagctcgacgctttcggccgccagctctaccgtacctccgtttcgttcgacgagttgcaaatcctggccaagaacaaggagaacatgtccacggcaatcccggccatctggcccatcgaccgtcaggccctgcgcaggggtatcgagccgttcggctaccgcaaccacccgatctaccaccgacgcatcctgcacaaaggcatcgacctggcggccaacatcggcaacaacgtctatgccacgggcgacgcgacggtacagtccaccgacctgggacagccccgcagaggatacggcaagcagatcctcctgaaccaccagtacggctaccagacccgctacgcacacctgagccagatcttcgtcaaacccggcgagaaggtcgtgcgcggacaactgatcggcaaggtcggcaacacgggcggcgtgaccggcccccacctgcattacgaggtgattcacatgggacaggtcgtcaatccgatcaactatttcaaccgcaatatgaccaacgaggagtacgagcgcctgatggaacagatgcaggagctcaacctcgacaccttcgacgaataacatggcaagaacccgcagaccgatcaaatacgccacaccgcgcacgcccaaacagaaggcgatccgcatcacgtttcacgtgctggtgtggttcggcgcagccatcctctactacgtcgggttttcgctcttcttcgacacgcccgtcgaatacgagctcaagcactccaccgatcagttgagggacgaatacacccggctcgaagcccgctacgactcgctgcgcacagtgatggaaaatgtttccgagcgcgaccgcaacgtcttcaacatcctcttcgaatccgatccttacgatttcgacaccgaatacgaaaccaagcggctcgcaacgtacgaaagcctgctggacaaatccgaccgtcagatcatcctggaactcaaagagaaggtcagacaatccgaagcgacgctgaccaagctcaacgaatcgtacctcgaactgcaacgtctgctggatacggtcggcgacggccgcaaccggattccggccatacagcccgttatcaaccagcagctcacgctgctcaccgcctcctacggcatgcgcatccaccccttctaccgcaccctgcaatcccatcagggcgtcgattacacggtgcccgaaggttcgcgcgtcttcgccacggcggacggccgcgtgaaggagatcgccacgcgctctacggcgggccgcaccatcgtcatcgatcacggcaacggttacgaaacctcgtacagtcacctgctggcggtcaatgtccgccgcgggcaggaggtccgtcgcggcgacatcatcggactttcgggcaacacgggactttcgatcgcaccccacctgcattacgaggtgcggcacaacggcatgcgcgtcgatccgatccactacttcttcatggaactctcacccgtcgagtaccagcggatcatccgcatcgcccagtcgggcatgcagtccttcgactaatttttcgaatcgcgaatgaaaaaagaaacggctatctatcccagccaccgcaaattgctgggcacaacgctcgccgcagcgatcatgacgaccctctcctgcctgctcgtcatcgtacagccgcacgggacgttcgggctggtcatcggcatcgcaggattgatcttcttcgggggaggcttctgcatcttatttatcatgctgctgaaaattttttttcgaagcaagccgaccctgttgctgactccggacagtctgcggatttacgtaccggcaaaagggatatacatcacgatcgagtggcagcgcattgcggatttcagcgtattccgaacctacgggcagaaattcatccggatcgaactccacgatcccgaccgggcgatcgacgaggaaaaaaaccggattgccaaagggcttatgcgctggcaaatgaaatactttggatccccctacgcaatcacggcttcaacagtcgatatcggcacggcggaactcgaaaaaatcctgcgggagtatttacaggcatcccgcgaaaaatccgctgcgaactgaccgaccctcccgcaaaagcggttctccgagccgatcccgcatatcgtcggaaatacgctcgcaccgtccgtcaatgaatcggatcaagatatgagacgctctatggccggtatttacaggctgcagactgattttccgaacgtgattatacactttcatatacacctcttcgggagcgcagtagcccaagctccctccgaagaggggattctggagcagaattatgaacgcggccaccagccgcgaaaagcgatcgtcggacaaggggcagattgaaaatgtaattgcccttccgaaaagacgacacggagaaaatcgctgcggcacgctcgcgtcagcgtttgcagatctcgcggaaatcgcaatagcggcaggtgtgctcggcatcctcgcactgacggaacggaatcgccggatcgaacatctcggcaagggtttcgcgcaacagccgttcgaaaggctcgcggtattcggaatagcgtacgcccgtgcgccccaactcccgatcgacgagccgggacgaatagtcgtcccggtgcatggcccgcacgtaatagagcgtcggctcggcatccaccccccgcgaatggaaaagcatcatcgaatagagcaacgtctgtaaaatattggattgacgctgtttggcctctccacgaaagagcgcttcgaccccctggaaatcgaggtgcggttcgccggtcttatagtccacgacccgcagcgtaccgtccggcaggcggtcgatccggtcggccaggcccccgaagaccacacgcagggattttccggcgctttcgaacgcaaactcctgcccgatccgctcctcgagtccttcgaccgtaaaatcgtcatgcgcggcgtcgtaaggcaatacgccgccccgaatatagcggattacaatatctttgaccaacaacagattaccgctataatcctcaaccgtcgcttcaacatcctgcaaatagttttcattgatggccgcaactaccgccttctccacttcggacgaacgggtcagcgcacgcaacgcctctccgtagccggtcttcccgacaaagggagcatagagccgctgcaaagccgcatggagaatcgtaccgaacatcggtgcatcgacctcctccgaaatctcgtcgtctggctccaaccgggccacggagtgaaaatagaagcgcaggggacaagccacataccgaaaaaaagccgtaggcgacagccgcacgggatcgtccggcgcgaggaagcgggccaacttttcggcggtttccccttgcttggggacctcgatcggcagggtttccatccgattgacatcgataccgacctcccggcggaggatctcgaagggagtttcgtactccagttgatagatgtaacggctctgttcgccggtggtcttgtcatcggcatgagcgcaatagagcatccgcacgttctcggcccgttgcagcaaacgataaaaatagtaggcgtaaaccccctcgtgatgctccggcgtaggcaaggcataggccgcccgcaggttgtagggaatgaacgaagtaccggtcacgacgctgccgggaaagttgtcgtcgttcatcgagagcaaaatgacgttgcggaaatcgaggttgcgggtttcgaggatacccatgacctgaattccctccaaaggctctccctcgtagggaatacgcagggtttgcaggtgtcggcgaagaagtgaagcatagatcgatatagacaattctatttcacaattatccagtgaattgcgaagttttatcacctcttcggaaatgacgttcaggaactctacgcggcggcgtgcctccgtatcttcgtaaggcatccgggcgatctgcgcgatcaccgccagcaggtagtccgaaaatccgcgccacccctcgacgctccggaacagcgtagcaagcaacggcgtgcaggccagccactccgccgcgaccgtgatacgccggtttcggacgatctcctcctgcatacggacgatccgggaggggtcgctttcgaggatataagggtgcgacagaagtcccagcacgtcggcgtggtaaaaaagcggtttgccctccttctgccgggcatggttttgcagttcgatcaatcgttcaacaaacgaataggaaaggctctgtttcagcggatagcccatcgtcacattcacctttccgatctccgcaggcagagcgtgcagcaagggcagcaacaggttttcgtccgtgagcacgacggcagtctccttccccagcggcccctgttcggcagccagatcccgcaggatcgaagtcacgtacttgcattgcacggcgttcgataccgtagaaatcgcttcgattcgcttcggcgaccggaaatgatcgtgcggaagttcgcgccgggcgggaaacaggatccggttctcacgcaggaacataccggcctcctggtcggcattgtccgtataataagtatcgtaatcccagtagaaatcggtttcggcagccgtggagagaaacttgaaaagccgtttctcgcactccgagagcgcgttgaagcccgccacgacgaaccgccgggactccgggaatgcgaaaccgccggccttgatccgctcggcggccgcccggtgcaccatccccgtataggccatccccagcgaccggagccgctcgcggaaagtccgatagaccgggcccagcgtctgccaaacggccaggaagcggcgtttctcctcggaaagggaggtttcgtccgtgaaattggcccagaaagcgatgattttcaactggacggggctcaaatacgaaacgtcggcctccaactccttgatgtcggccaggttgcggaaaagcatatcggcgtcgatcaggtacttgtcgatcgtatcgaagtccgtgaggagcatctccccccagaaatagaacttgtcgaaggattcgggatgaaattccgaatagactttatacagttcggtcaccagacgcacccggtcgccgatgcggagacccgaaatctcgctcatcaactcgtcgatagtcgtccagcggggctgccacaaaggacgttcggcgatgccggacaaggcgtcgataaagaaaagccgcgcacgtcgggaagggaacagaacagaaagggacgaaatatcgtccccgtatctgtcgtataaatcggcagcgacttcctgcaggaatcccggcatggcaagtgcgctatttgaaggtgatctcgcccccgatcagggagtttgaagtgtgcagcaactcgggctctccgatgcaggtgatccggcccttcgtaccgaccgacgcctcgaggcgctccggagcggtgatggtcacgtcggccttggaggtggaattgacacgcacggacatcacttcgacagcggcagcgtccacctgggccgtggaaacattcagatcccagtaacggaccttgcccgtcaggaccacgacgctcttgcccgtcacatccatctgaagatccttcacatcaagcgccgcgctgacgaccgccccgttggaaaaccagcaccgggcctgcggaaagtcgatcggttccccgaacgtggcattcgcccccgaaatacggatctcctccaggttgttgtaataaaccgtcacctcggtttcggaacgttcgcgggcgccgatgcgctcggaaatcacgagcatcttattcttgttcacctccgccgtgaagcggctgtcgtaaacgcctttggtgttgaaaacgatcttgggagcctgatccataggcacccgctcgaaccggatccggaacaacccctcgacgatcacaccattgaaggaaggaagccactccattttctcgccgctcgccgctgcgatttcgggagccaactccccccgatcgatcagatcattctgggccgaagccgtaaatcccagcgtcaggagcgccaggctcagtatccatcttttcatagttttttctgttttttgctttttcgtaacgccaagatacgatatttttttgaatttctccgtccgtttcccattttatcgctacctttaccaaaagaacgtcggtttagccggcaggcatccggctccggcagccttcatccgccaccggcatcgatgcggccggaaaaaatgcccgggcagcagcaaacctgccgcaaagcgggattccaccggccgcttccatccgacattttgaagcgataaccaagtgagagcgagaatactgaacgccagcgccgggtcgggcaagacctaccagctggcatacaaatacgtgcgggacgtggtcgagcaacccacgctgtaccgtcacatcctggccgtcacgttcaccaacaaggccaccgaggagatgaaatcccgcatcctgtcggagatacatacgctggcctcgggcggcaaaagcggctacctggccagcctgtgcacggagctgtcgctcgacgaacggaccgtccgcacccgagctcgggaagcccggacccgcatcttgcacgactattcgcggttcacgatcctcaccatcgatacctttttccagcgcattctgcgggctttcatccaggagttgggactcgatctgaactacaacgtagaaatcgaaaccgcctcggtactctccaagagcgcggatgcgctggtcgaacagatccgcatcgacgaagaactgcaacggtggctcacggccttcgtgcaggagcgcatcgaagacggcaaacgctgggatgtacgcgaaggcatcctcgccctgggcaacgaaatattcaaggagagcaaccgcgaaaccctctcggcggagcgttccaaggccgaactggaccggatcgtcggcaaggcgacggggagggccaaggccgggaaaaaggagtttcaggaattgggcgttcgggccatgaacctcatgaataccgctggcgtcacgacggccgacttcaccggcaagagccgcagcttcgcgggctacttcgcggccgcagccgccggagagatcaaagcacccacagctaccgtgcgcaagatgagcgcgacgacggaaggctggtgcgccaaggactcgccggccctgccgctggtcgcggagcttcagccgctgctggccgaactgtgcgcccgttacgaccgcagcatccgcttctggaacaccaccgacctgctgcgcgagaactaccgcagcttcgccctgctgcaggacctttacggcaaagtacggcagatgtgcagcgacgagaacgtgatgatgctctccgagaccaaaaacatcctctcggagttcatccgccacaacgacgccccgttcatctacgaaaaagtcggcaaccgctacgaccggttcatgatcgacgaatttcaggacacctcgacccgggagtgggaaaacttcctgcccctgctgggcaacgccatggcacagtcggaacagacctcggtgctgatcgtgggcgacatcaaacagtcgatctaccgctggcggggcggcgactgggagatcctgcaccgccgggcggcacgggagctgggagaagcgagcaccgaaacgatacacctgaaggagaatttccggagcttgccgctggtggtggagttcaacaaccggatgatcggcaaggtggtcgaaagcgacaacacggcactgaaccaactgctcgcccaggctccgccgcacgccctgggggaaaaggcccgagaagagctgcgcgacaccctgcaggaggcctatcgcgaacacgcgcagagcgcccgcaagaaaggactgcatcccggctacgtcaatatcacccattacaccggcgagccgcccctcatcgaacgcatcaaagctctcgtggacaaggggttccgaccgaaagatatgatgattctggtgcgcagcggcacggacggcgccaaagtcgcctcggcactgctcgacttcaagcgccggaacacggatccccgctaccggttcgacgtgatgacgcaggaggcactcatcgtcggcacggcaccgatcagttcgttcgtcatcacctgcctgaagctggccatgaatcctgcggattcgctgagccgggccatttacaaccatttttcagccaaaccctccttcgatgcggaactcacggaagaggaagtcgtctttctcaaatcgctgcggctgttcccgcccgaagaggcgttcgaacggatcgtcatgcggtacgaccttcaggagcgacgggaggagatcgcctacctgcaagccgtgcacgaacagatcatcaacttctgcgcgggccgcgtagccgacattcccctcttcctcaaatggtgggacgaacagggaagcggccgctcgctgagcgtcgaacagggcgaaacgaccatcgaaatcaccacgatacacaaggccaaggggttggaaaaaaaggtggtgctgatcccctactgcaactggacgctcaatcccaaatcgagcggactctcggcgaacatcgtctgggccgaaagcacggacggggagctggaggaaatcggccggttcccggtgcggtataaaaccagcatgggcgaatcgctcttctcggcccactattaccgggagatgatctacgcgcacgtggacaacatcaacctgctgtacgtagccctgacacgggccgtggagtcgctgcacatcttcatcccgcagaagggagccaagggaccgaacgtcggacagttgatactgcaaaacatcgccccggaggacggcacggtccggctggacgggctggagggcagctactcccgggacgaagccgccgaaacctacgaattcggcgaattcgccggaccggagccggatacgcaccggaaagcgaaagccgcgcacgtcctgctcggggactaccccacgtcggagccgcagttgcaactgcggctgccgacagaacgctactacgaggaagagggtcgggccgaactcaccccgcgcgacttcggcatcctgatgcaccgggtcttcgaaaacgccgcgacaacggatgagatctacatggccatcgaagcgatgacccaggacggcgtactcgatgaaaaagaggccccccgcctgcgggagctggtcgaaaaggccctcgcggatccggtgacggcggagtggttcggcggcaggtggcaggtggtgcgcaacgagaacgaaatcatcctgccgggcagcggaacgacgcggcgccccgaccgcgtgatgaccgacggcgagcgggccgtagtggtggattacaagttcggcgaccgggaaaccgcacgccaccgcaaacagatccgcgagtacctgcgcctgctgcggcagatgggttacacccggacggaaggctatctctggtatgtacgtctgggacgcacggaacgggtggaggagaaggaggattgaaaaacggggagaacagaagcgaataccgaaaaaacagggacaaacggcgaatttttcgaacagataatcgtatatttgatacgtttttgggacgcatcccgcaacggaaagagcgagcgtccccgacttatacaaaaaatgcaggccggctcttgcgaacgacaatcgcagaccggtcccgaaaaacagcttcatgagatcaatcctgctggacatcatcccccgccgattccgccgccggagctacctggtttccggcacgatcttcctgcgggccctgctcaacttcgcaggactggctctgctgattccggtactgctgctgatcctcgacagcgagagcatgcacacgaacccctggctcgaacggctgtaccaagcgggcagattcgaatcggaccgggcgttcgccctgaccgtatgcggatgtatcgtcgcactgatcgcattcaaaaacctgctgaacctcttcctgctgcgctacgaacggcggtatatttacgacctctaccggtgtatgtcgcggcggctctatatcgaatatcacgaccgggggctgggattcatcaaaaacaccaattcggcactgctctcgcggaacgtcaatttcgtctgtctggcgttcgttacggggatcctcgtaccgctcgcgtcgatcacgagcgagagcatgctgctcgcactgctgttcacggcgctgctgttctacaaccccacagtcgcgggactggtcctgctggtattcattccgaccgtctggttctactacagcgccgtgcgcaaacggctccaccgttacggcgtacaggagaacgaagcccagcgcgagaaggcccgcacggtcgtcgaaaccttccggggatatgccgacctggagatcaacgatgcctttccttcgatgctgcgccgcttcgaccgggcgatggacaagatcgttacgattcagtccagaaatatgaccgtcaatgccttgccttcgatcttcatggaggtaggactggcgatcggcatggcgctgttcgtggcggtcagcctcggtacgccgggcgatgaagcccgggtcctcttcggcgtattcgccgtcgccgggttgcggctgatgccttcggtacgcaacatgatgtccggatggtcggcactcaaatacaaccgctacaccatcgatatcctgcgggacatcgacctgaacgacgaaaagccggaaccgtcagccgcacagcctccgctgcccttcgaacgtgaaatcgccgtgcgcgacctctcgttccgcttcgacgacgagcgcggcgacaaagaggtgctgcacgggctgacactcacgatccgcaagggagaacacgtcggtatccgaggcgcatcgggggccggaaaaacgaccctgttcaaccttctgttgggattctatacccccaccggcggtgaaatcacgatcgacggcgagcccctgaccgccgccaaccgccgccgctggcaaaatgccgtcggctacgtttcgcagcacgtgttcctgctggacggcaccctgctggaaaacatcgccctgggcgaagaggaggagaaaatcgaccgtcggagagccgaggagtccctgcgtgccgcccggctggaagacttcgtgcaatcgctctccgcagggatcgacaccccgatcggggaggccggcaacaaactgtcgggcggacaacgccagcgcatcggcattgccagagctctctacaaacaggccaacattttattcttcgacgaggcgacctcggcgctcgacagcgggacggaggagggaatcaaccgttcgatcgccgaactgtcacaacacaacagagatttaaccatcgtggtcatcgcccatcgagaaagctcgctggagtactgcgaccgcatcatcacactcgataacaatggatagagaatatatcatcgccggattccgcatccggctggaacaggccgaccggctcttcgtaagacccggcagccacatggctcgggcattcgaaccgttcgccgcagaagcggacccggccgcgcccctgaccatgcgcctgattccggactgcacgataaataaaaaattaacaggaggagagccgaacagggaactcgacgtatttccgttcgacgatgcggaagccgactgccacttcgagcgtacgccgcgaggttacctgttccgcatggttccccgcaacggggatcgtccgacgctattcttcaaagcgttcgattcgccggatgtacagagcgacctgctcgccgacggacgcgaaccccatcaatccctgatgcgtttcgggctttggatcatgttcggcatcgccatctcccccgaagccattgcgatacactcctcgaccatcgaatgcgaaggccgggccgtcctgtttctgggagaatccggcacgggaaaaagcacccatacccggctgtggcaggagcacattcccggagcacggctgctcaacgacgacagcccgattatccggatgtaccaggggcaggcgaccgctttcggatcgccctggagcggcaagaccccctgttaccgcaacatttcgcggccgattgccggaatcgtccggttgagccaggccccggccaacgaaatcacccgactgtcaatcttgcgggccgtcggatcgctgctcccgtcctgccccccggcattcgcctacgacagcgatttgcaggatagaatctgccgtacgctgtcggacattctcacccaagcccctgtgtggcacttggcctgcctgccggacaaggcagcggccgaactctcctacgccacggtcctcgaaggaaaacagagagcctgaaaacaattgatcatggaaaaaaccgtagcgaaccggatcgccttcgcccagacgagggacctgctgctcgaaggccaaaacgtacgaatctgcgtccagggacagagcatgctgcccttcttccgcagcggcagcgtcatcacgctgcggcccctgcgccacgaggatctgcgacgcggagcggtggtgatggccgaaaccgtacaaggcaatttcgtcgtacaccgcatcattcaggcgacaccggaagaggtcacgctgctcggcgatggcaaccttaccacggaaacgatgcccccggccaaggtttatggagttgtggattgtagtgccattcaccgggtattggctcgggtatggctctggctgcgccccgtacgacgttatccgctctgggttctgcggcggatttgcagaaaataactcccgaatcggattcaagcaagagttatgctctctgtttctttaagttctgcccgccccgaatctcgaaaataggattagagcacaatacggcttgcctttgcgtactcattatgcagtaagtaccgatggggttccaattgaatgtacggctattttgaatcatcgatccgaaagtattttttatggtaaatataaatatttgaataactgattatgagaaaaataattctttcttgtttgttgttgggaattagcttgaccacgtatgctcaaacaagcctatttgatttatggcaggaggcgtcggagcacgtcaatatttatacttatggacttaaacctgtgaaaaaagatccatgttttcgtccggattggaagcagaaaagaggtacgaaattggaaatttcttcccccacaataggactcttaaaaaagatgcttgaagatgtcgaatcggaagggtttcagttcaaccctcaaaatgacacattacttttctatgtgagtttttgtagttggtgggctccatgcgatcttgttgttaaaacgtcggcagggatatctcattactacaagccaacagagagtcgtttaagattgatttctgttatgcttgctgaagacttttttataagttctatcttgtattatggcgataactccgcatttacagattttttccgacgttatgtcattcttgactcagattcatatgctgcggatactttggtttttcgtattatcttaaaagatgggaaaatcatgactccatctgaagtgtggaaaattgccgatgtatatatgtggggaggaaattattttactgaagacgatataatatttttgaaaaaattgagtcgttattacaataaatcggacctgaatcgattagaaaatttttcgcgcacaatattattgcagtaaattgttctctaatcttcagaaaaggcatttccatactcttttttcggcaccgaccgcaatcattgacaagcctccgttcatatcgaattcgactacttcaccccatcgagggggggggaacagaggaaatcccttcttagaaattcaagaacaccgacaccataaaagcaaaaaatagcgaaggaaattccttcgctatttttcgttatagggtcaccgattacgcttcgagcgcgaaacgcttgtaagcgataaccgtagcatccttgtccgccttgtggataaactcggcgatcgtctccttctcacctaccaccggctggttgagcagcgtattctcctcgaagaacttgcgcatcttaccctcggcgatcttctccagaatagcctcgggtttgttggcattcttcggatcctgcttcatggcctcgacagcgatcttgcgctcgtgctcgatcacatcggccgggcaatcggcctcagagatcgaaacgggagccatagcggttgcctgcatggcaacggtatgggctacctcctcgggaacgaccttgttgaagccgataagcgtaccgagcttcttgttgaagtgtacgtacgcatgacagtagggagcttcgatacgggcatagtatgccagctcgatcttctcgccggtctgacccgatttctcggtcaccatctcctcgacagtgcggccttcggcattcttggctgccagcagcgcatcacggtccgcagcatcggttttcacggcaacgtccagcatcgcgttagctgaagcggagtactccgcattctgcgccacgaagtcggtttcgcaagccaggcagaggatataacccttctgacccacgattttcgttacgacgacaccttcggtggccgtacgatcggcacgcttggcaacgaccagcttacccttttcacggatgatatcctgggcacgcgcgaaatcaccttcggcttcggcaagggcctttttacagtccatcataccggcaccggtcattttgcggagcttcattacatctgcagctttgatttccatagtcttggttttaatttcgttgaacttcgttctgcttttccgtatcccgaccgactcggatcgctcgggcgatcttcgcacgggacggaaacgtccataatctccgtgcgaattattccgctttctgctcggtcgcagcgacaacctcggcaacggcagcctcctcggcatccacggaagccttcacggctttcttgatacgaggtttcgcatccttcttcgcaggagcatcgccctcatgagcctcattctcctgggcctccttctctttttcgagctttcgctcctcgaggccctcgctgatggcgccgcacacggcgtcgaggatcacagcgatcgacttggtcgcatcgtcatttgcagggataacgtaatcaatgtcggttggatcacaacaagtatctaccattgcaaatacgggaatattcaatcgcttggcctccttcacggcgttggactccttctgcacgtccacgacgaacagagcggccggcagacgggtcagatcggcgatcgaaccgaggttcttctcgagtttcgcacgctgacgcgcgatctgcagcttctcgcgcttggagaaattatcgaacgtgccgtcgttggtcatcttgtcgatggtggacatcttcttgacggctttacgtatggtggggaagtttgtcagcataccgccagcccaacgctccgtaacgtaaggcataccgatagctgcgatcttttcggcaacgatttccttggcttgtttcttggtggcgacgaacagcacgcggcgaccgctcttggcgatctgcttgagtgcgtttgccgcctcatcgagcttcagcacggtcttgtgcaggtcgatgatgtggatgccgttcttctccatgaaaatgtaaggagccattttgggattccacttacgcttcaagtgtccgaaatgagcgccggcttccaataatgtattaaaatctgtacgtgacattttaattcaatggtttaattttaattctcttttcttcaactctcccggtagtgaactgcggtcaatccggagagttttccgcgatcaggcaacctgtaagtaatagccgatataataataaatataggtagtcttgccggtttgtaacctgaatcgtgcttgccgaaattcggtcgtacgattaacgcttgctgaactggaacttacgacgtgctccgggctgaccgggtttcttacgctcaacttcgcgaggatcgcgcgtcaggaatccgttcttcttcagaaccggacggaactcggcgtcgatctcgcacaatgcacgtgcgatacccagacgagccgcctcagcctgccccttgataccgccaccgtccagattgatggtgatatcgtagttctctgcggtgttggtagccaacagcggctgcttcacctggaactggaggatgtcgagcggaaaatagacttccagcgatttgcggttgatcgtaatctcccctttacccggcttcacgaatacgcgagccacagcagccttacgacgacctacggtatttacaacttccataattcttacttaatctcgtttaacttaattgccttcgggttctgagcggcgtgcggatgctcggcgccggcatacaccttcagattcttcataatggcttcgccaaggcgcgttttggggagcatgcctttgacagccttctcgatgagaaacgtcggtttcttcgccaggtaatcggccggcgtagcgaaacgctgacctcccgggaaaccggtgtgtcgtgtgtagaccttgtcggtcatcttcttgcctgtgagcttcactttgtccgcgttgatgacgataacataatcaccgcaatcgacgtggggggtgtagctaggcttgttcttgccgcggaggatcttcgcaacctgcgatgcaagacgtcccaatacctcgtcggtcgcgtcgatgacaacccattgcttgtcaaccgtagcggcgttcgccgagatagttttgtagcttaatgaatccactttgtttacgtttaattaatacttatttatccaacctcccgcactatacgggtgcgcaaagatacgaagaaaatccgcaaaaagcaaaacacccgaacaaataacgtcaatatattctaaaaaagccatttacactttttacaacaaaaaaccgcgcccggcttctttcgtccgaagccaagcacggtttttttacgcatccccggcggtcaccgcagaaaatcgaccagtcggcagcgcacctgcaacaagataccgggccgacgcagaaagcgtatcaactaccgtaaggtttgaaattcttctgtccgttataacgtccgatggtcggatcgaccagtttttgcggacgcaccttgaactccacgggcagaacgtaagaaacccgcacgggataatccagaccggactccttgtcggtcatgatgcccggagtccacttcggagaattctcgaccacccgcgtaaccgcttcggtcagcttctcatggggcgaagcaagcacttcgtccacagtcacggatccgtcggtttcgacgataatccggacttgcaccactccttcgaccttctgctcttccatatcggcaggatactgtacgcgcgaaagcacccatttccaatacttttcgaaccctttattcttaaacgacggggcttttttcaaacgtgcgacctggccatccgcaatgaccagtccctcggccggaggtgtcgaagtcgtcgtacccggggcatcggccggagtttgagccatcgcgggtaacaccagcaacaggctcacggcataaaacagaaattttttcatagcatctgtctgttggtttctacataaacaaaaatagtgaaagccgagagacaacgggaccttgttcacggttttccgaggcgcatcctatctaagactatgtcaaagatagcgagaggtaagagcaattgtgagaacttgttctcgaaaattgccgaaccgaatcctatcttctacaaagataggaaaagccggatgcaaaagcaaatttatttgcattttcccgaggcggaattttaagacgactcaaaaagttaggcgacagaaaacactcgaatatcaattatttattcgtttcatcgcaagaaacaggagccggacggaacaacgcaaccggaaccgccccggtctgatcccggaatccattacaataccaaaagccgcacgatcaaatttcaagcatggaatcatagctgttagcggagctttttggatgcgtaacggaccaagtcctttccgaagaaaaggagcaaggaagggggcgaattataaacgcgaccaccgacagcgaataagcgaccgtcggattcgtgctgcgatcgtcgaataagggtttcttaaaaaatataattaccaataggcacaccgcagccgatataggcgtcagcaaccttctttcccaggaaaaagaagaggaccgtctgcaaaacggccctcttcaatctatagaaaccccggactatcccaggaacgacagcagaatacctgcggcaaccgcagagccgacgacaccggctacgttcggacccatggcgtgcatgagcaggaagttgctcggattggcctcctggccgacggtttgcgatacgcgggctgccataggaaccgcagaaacaccggcggagccgatcagcgggttcatcttcttgccctccgggaggaagaggttcataaacttggcaagcagcaaacctccggccgtaccgagagcgaacgcaagcacacccagcaccagaatactcaaggtctggacattgatgaacgcttcggcggtagccgtagcaccgacggtaataccgaggaaaatcaccacgatattcatcagctcgttctgcacggtcttgctcaaacgatcaaccacaccgcactctttcatcaggttacccagcataagacagccgatcagcggagcggcgctcggcaggagcagcgagatgattacggcaatgatgatcgggaagaggatcttctcggttttggaaaccgggcgcagctgcgacatcttgatttcacgctctttcttggtggtcagcagacgcatgatgggcggctgaatcaccggcacgagggccatataagagtaagcggccacggcgatcggacccagcaattcgggcgcgaggcgggcggtcaggaagatcgcagtcggaccgtcggcaccgccgatgataccgatactaccggcctgagcaggagtgaagcccaacgcgtaagcccccaggaaggtcacgaaaatacccaactgcgcagcagcaccgagcatgaaactcttcgggttggcgatcagcgggccgaaatcggtcatggcaccgacaccgatgaagatcagacacgggtagataccgagcttcacacccagataaagataatcgagcaatccggcatcctgaatgaagcttccccagtggatatgtccgccggcgaacagttcggaatggaacatattcgctcccggcaggttggtcagcagcataccgaaagcgatcgtgaagagcagcagcggttcgaacttgtgtttgatggcgaggtacaggagcaggaaagcgacgagaatcatcgctatattcccccaggtcgcccctgcgaatccggtctgattgaaaaaatcgaccagactgtcggacaatgaaatggatccagctgttaacatcatatcacttattcgataacgattaacagatcaccttccatcacggtagcgcccttctggacgtggatggatttgacaacaccgccgcgttcggcatcgatgttgttctccatcttcatcgcctcgagcacgaaaagagtttgacggggagcgacgcggtcgccctccttcacattgaccgagaggatcgtaccgggcagcggagatttcacctgcaaaccgggaccgccggcagcagcctgtgcagctttgggagcggaaggcgcagccgtagtcggagtcaccgacagccctgcagctttcggagcgggaacgacctgcggtttcttcatcttgctggcctgctcgccgacgatttccacctcgtaagcgacaccattgacggtgacgttggccatcgtcgattcttcgttcacgtcctcaatcgaaatgtcgtattgatttccgtttattttcaatgaatagtctttcataacttattttctgtaatctggcatttgagttaatccgtgaattttcgagttccagggcgagtaagcccgcttgatgctcaaaatcgtaagcatctcggtttcccggtcgtgacgggcgctgccgaagagcttcagcgccgtcataatggcggctacggtctcctcgtccaattccgtctgcgacggtgactgcttcttgcgctgatgcgtaaagaaagaaccgaagcccttcattacaaagaccagcagaaggagcatgacaatcaccaggcagaacccgacgcatgtgatcgtaaggatacccgaccaatctatctgtgtcataattcgtcgatttataaaggaatattagagtgcttcttggccggattctgcaaacgtttggttgcgagcgactgcaaagcgcggataatgcggaaacgcgtgttgcgcggctcgatcacatcgtcgatatagccgtagcgggcggcgttgtagggattggagaacttgtcgcggtactcctgctccttctcggccacgaacttggccttctcctcggcgctctcgaaagcggcgagctccttggcatgcagcacctcgacggcaccgctcgcacccatcacagcgatctcggccgtcggccatgcgtaattgatgtcgccacggatatgtttcgaagacatcacgatataagcaccgccgtatgccttgcgcagcgtcacggtgatcttcggaacggtagcctcgcaatatgcgaacagcaacttcgcaccgtgcgtaatgacaccgccgtactcctgggtcgtacccggcaggaagcccggaacgtccacgagggtcaccaacggaatgttgaaggcatcgcagaagcgcacgaaacgggcggccttgcggcttgcgttgatgtcgagcacaccggccatgtacttgggctggttggcgatgataccgacgctctggccgttgaaacgggcgaaacaggtgatgatattctttgcgaaatcggcagccgactccaggtattcgccgttatcgacgatggcacgaatcacctcggccatatcgtaaggcttgttcggattgtcgggaatgatctcgttcagagaatcctccaggcggttgatctgatccgtgcagacgaccatcggcgtatcctccatgttgttctgcggcatataggagagcaactgacggatcagttgaataccttcctcctcggtttcgacggcgaactgagccacgcccgacttggtcgtgtgcatcgtggcaccgcccagctgctcctgcgtcacgtcttcgcccgtcacggtcttcacgaccttcgggccggtgaggaacatattcgaggaacccttcttcatgatgatgaagtcggtcagcgccggagaatagacggcaccgccggcacaggggccgaagatggccgaaatctgcggaatgacacccgagcacatcacgttacgctggaaaatgttggcataacccgccagagcgttcacaccctcctggatacgggcaccgcccgaatcgttcaaaccgatgcagggagcgccgttgcgcatcgccatatccataatcttgcagatcttgtcggacatcgaaagcgacagagaacctgccgtcacggtgaagtcctgggcaaagacatagaccaagcggccttcgatcgtaccgtaacccgttaccacaccgtcgccgaacgtatgcttcttctccataccgaagtcgtagcaacgatgcgtgacgaacatgtcgaactcctcgaagctaccctcgtcgagcagcatctggatacgctcgcgtgcggtgtacttacccttctcgtgttgcttgtcgatcgccttctgaccaccgcccatacgagccatctcacggttctcgatgagctggttgatctggttctgaatttcactcataatcgaaaatatgctgttaaattatttattcttgttctcgcaaagctccgtcaggatgccctgggtggatttcggatgcaggaaagcgatggtcatgccctcggcacccttgcggggcgtagcgtcgatcagacggatgcccttggcggctgcatcggccaactgctcctcgatattctcgcaggcgagtgccatgtggtggataccgatgcccttgttctcgatgaacttggcgatggtcgattcgggcgacgtaggctcgagcaactcgatcttcgtctggcccagcttgaagaacgccgtgcggactttctggtcggcaacctcttcgatcgcataacatttcagacccagtacgttttcccaatagggaatcgactcatccaggcttttgactgcaatgccaagatgctcaatgtgagatactttcataatttcaagagatttaattaagttgaatatcgttgaatttgaattttcggaatcctcaaaaaatcatacaaaaatagatgaaatatctgaataagccaacaaaaaaacgattttagtcggaactattccgactttccggcatatgcagggaaaaaacggaaaaacaaagcggttatccgtgaaggacaaccgcttgaaatcaagaaaaccgaaggccgaaaccccgccgcagattataaaataccgcgatgacagcacacgtcagcaattccgagagcggcatggcgagccagatgccggagatcccggccacacggggcagcagcaggaaagcgggaaccaaaaggacgaagcctcgaagcaaagcgaacgtagtggcggctcttacccgttcaagactctgataatacccgatgacggtcaggttcacgatgaaaaagacgaaacccgacgcaaacaacggaaacccttcgatagcgataagggcagccggcgtatcggtatcgaggaagaacccgaccaatatacggggacagcagacgaacaatcccatcgcggtcataccgcacacaacagccgttgccaatgcgatccgtcgtgcctgtatcacccgccccgaagcgcctgccccgaagttatagctgatgatcggctgtgccgactgcgcaatggcgttgccgaccatgaacacaaaaggaatgtagtagcaggcgatgccgaacgctccgacgccgtcatcgcccaaatagcgcataaacacctgatttccggtaaacatcaaggtcgcaagagtcgcttcgcccaacaaggccgaggagccgatacgacactgataccccacattccgcaacgagaggcgcaagctcttgcggctgcccttaagcggacagagggacaacgaacgggcccggcacagcaggtaccacaaagcgataccgccgccgacggatacactgatcgcggtagcgaacgcagcccccatgacgcccctccccagcgggaaaataaacaaccagtccagcaacacgttgagcaacgccgagataacactgcaccacatcgccagcttcggcgccccgtccaaacggataacgaaaagtccgacggccgtccacatctggaaaaccagtgccggagtaaaccacaacagataatccttcaccaacggcagcagatgctccgaagcccccagcaacacagccgtccggtcggggaaaagcagaatcgccgaagacagcagcaaggtcaccgccgtcacgaacaccatcgcctgcgtgacgttcaggcgggccgcccggatcttcgactgcgacaagtggatcgaagccaccaccgagcagccgataccgatcatgaagcccattccctgaaagaccatcagcagcgggacgtagatattcacggcggcgatgccgtcgctgccgacgccctgccccacgaaaataccgtcggccaccgtaactgccgaaatactgagcataccgcacaaagtcggaataaacagacggcggaacaataccgaaaccttcagcgaaccgaaatcaatagcatctctttccatgcacaatcatactaaattcaactacttgcacatttagcacaaaacaaaaaacaccggacaagcgattggttttacccagtcatcttatccggcattatattgccctccgatgaggattacaaaactttcaatgagatttttcggtgacaaaagtagcgatttaatccgaagcgtgcaactatcgatcggttaattgctcccgtattatcactccctggtccgcaagttatcgtcgggagttttccatcgttccacacgacgcaggcagcatccctgcacctgccgacgcaatccggaatcggacaggatcgcatcgagcgtatcggccagctcatcgagctccggacacgcgatataacgggccgcatcgccggcagtcagccgattgcggcgggtatcggagagcacggccggaatcccggcatagagcgcttcgacgacaggctgcacccgcccccgtttccggggcaggtaaaccaggccgtctgccatgcggaaaaaagcgctcaactcctcgggcgagtattcgtaaataaaattggtacgcagcgccagacgacggtcgcgagcggtgcgaagcaacatatcggcatagaacgaacgacgaccgcaaagcacgaggtccgcaccgagccgaccgccggccatcagatcgagcagcatccgctcctggccgagcgtttcgaccgtcatcaaggtcagaatataccgctcgggcaacatgaacttacgacgaatgacctcatccgactccccggtcgcgcagcgcatacgctgacgcacctgtccggccgctttcacagccgtcatccgaaaacgttcgtcctcctcgtgcgcctttctgttctcctcgcggaggctctcttcctccatatttcccgtcttacgttgcggtccccatatattctccataatataaatctcctttccggcagaaaaccggtctttatttattttttttcactatcttcgctaaaaattacgatgcctatgaaacgagttcttttactccttactgtcgttttttgcacgttgggcgcatcccatgcacagaacatcgtcatcggagagcgggcccccgaactcaaaagcgtcacttggctcgcatcccggaatccggccgccgcagacctttcgttcctcgtattcttccactcgtcgaacaaaggctgcacggcgtcgctggacgcactccgggatctatctaacaaattaggctccaaactgcgcattatcatcataacacaggaagattctgataaaatcgccccgattctcacgccctacatctccgaacggatcggcgtggcgctcgatcacgacaaaaaagtattcggcagtttcggagtcgatttcgtgccgttcagcgtgctgatcgatgccaagaaccgggtgctgtggatgggaaatccgcagagtatgaccagttcattcatccagaaaatagttcaataaacaccagtaataccgttaattccgtcatgtcattcaccaagataaaccattacgaaaaagagtatgccgacacccaccacgagtgcgccctgaccgtaaccgaaggtgtggaaaaccaacccgtagtcaatccctatttcgtccgaaagaaaaagcgtgcactcaccaccgaagagtacgtcgagggcattcttcaaggcaacatcacgacgctttcgcaggccatcaccctggtagaaagcagcaaccccgaccactatgcccaggcgcaggagatcatcgaaaagtgcctgccgcatgccgggaaatcggtacgcatcggcatcacgggcgtcccgggagccggaaaatcgaccttcatcgaagccgtaggcaatatggtcacctcgctcaagcacaagctggcggtactggccatcgaccccagctcggagcgcagcggcggttcgatcctcggcgacaagacccgcatggagagcatctcgtccaatcccaaggtcttcatccgcccctccccttcggccgggtcgctcggcggcgtagcccgcaaaacccgcgaaacgatcatcctgtgcgaagctgccggattcgacgtcatcttcatcgaaacggtcggcgtgggacagtccgaaacggccgtacattcgatggtcgatatgttcatgatgctccagatctccggtgcgggcgacgaattgcagggcatcaagcgcggcattatggagatggccgatatgatggtcatcaccaaggccgacggcgagaacatccacaaagccgaactggccaaaacgcaatatcagggtgcgctgcgtcttttcccggtcccggaatcgggttggcggccgaaagtctatacctgctcggcatacacaaaaacgggactcgaggaggtgtggaaaggcgtcgaagagttcctcgacttcattcaggcgaacggatacttcacgcacaaccgcaaccgtcagaacaagtattggatgtacgaaaccatcgacgaggtgttgaagaacagcttctaccacaacccgcagatcgaaccccgcatcacggagctcgagcaaaaagtgctcgacgccaaagtcagctcgttcgtcgcggcgcacgaattgctggagctttacttcaaaaacaagaactaacggaccacgcagcaaccgttcctgtcatacggcattgaaccaaacacttaatatcacttaaattcctaaacaatgaaacacgtaaaactattcgcagctctgctggcattcgtcatgctcggagcctgcaccgaatctcccgaggagggggggggctttcttccatcctgatcgacagctctttactggagcaaatctttgacgctgatcaaaccgctccgaaaaccatttcgttcacggcagcggaagcatggactgcaaccctcgaagagacgacgcgcacggaaccttcgtggctccgtctgtccgcctacagcggcgatgccggcaaagcgcagatcaccatcgaaatcctcgaatccaacagctcttccgaatcgcgcttcgccaaaatcacgatcgtctgcggctcttaccgcatcgccatcgaaatcgaacaaaagggacacggttcagacaatccggacaatccaaatgatccagatgatccagacacgcctccgaccgattacaaatacgtcgcccgggtggattacaaactcacagacaaccgcgaagagggagcgacgacgaccgtctcgcaatcattcgactacgacgaagaaaacagagtagcccgaattaccgaaaactaccactcgaccgacgaatactcctataaagacaacggaacggagatatatacattcgactatacgatcgccaacgaagtttcggtccggacaaccgatgaggcggagcgccttctctacaaaatttccgccaaaaccgacgcgaaaggacgcatcaccgaaacttcgagttacgactacgacaacgggacaccccggctcgaagggcaggagacctatacatacaccccggaaggacgtctctcttccttgctatccaagtattcctattcctcttccagcggcctgaatcaatacagcgaaaacaaattctactacacggacggcctgctgacgcgctacacctactacgacagttacgaggcctcctacgacccggactaccagccctgggagtattcgctcccggccgatgagtgctacccccaccgttatgccaacgaccggagcaacctcgatttctacatgtatgcaatgggcggtcgcatctcattcgaaaacacttccagcgctattttttccctgttacgcctgaccggaaactacggcgattgcctgcccgaaataaccactgccgccgacgaggacgacgaggtgggagtggatgagggtgcttatcccacaccaaatgtcacgctacacaaatcctacaccactacggaatccgcctgcggagaggacgaatacctgaaactgcgcatcgaaacggatgccgacaatgcggtaaagcggatatcctacgacgtcccgtatgaggagtatcaggtagaatacgacatcgtagtcggcaacgaagtcatcgatgaagctatgaaccaccccgagttccccgaagaagaaaaactttacaaatacgaaatcaaaaaccggacgaaaaccaaaatacgcgacatcgtaaacccggcaacgatcgagatcacctaccgatagttccggagaaattttcaaaagaaacaataaaacgataaggagcggtaatccgctccttatcgttttacaatcctcgaaggtcgtcccatccctccggcgcaacccggcaaatcatgcgggaagagtttcgaaccgactgccttccgaccgcgagaaaacgacagacagaaaagctgtgattcaagagaattccgacttcaaccgctccgccagttcgggcatgccctcggcggcacgtgaacggatatgggtgagcggattgcggatcatcgccgtatcgggatttcccggatcgaccagaaaaatcggcacatcgggccgcacgtaacgcaccagcgatgcggcgggatagaccgccagcgaagtaccgactacgaccatgagatcggctgtcccggcgatctcggccgcccgttcgaacatcgggaccgcctcgccgaaaaagacgatatgagggcgaagcagggagccgtccggagcggttgcatcgagccgctgttcccagccgtcgatgggcacgatcaattcgggatcgcgcgacgaacgcaatttagtcagctctccgtgcaagtgcgtgacgcgcgaagagccggcccgctcgtgcagattatcgacattttgggtaattacctccacatcgaaacacttctccaggcccgcaatagcacgatggcccgcattcggctccttcccgagcatctcgcggcggcgcatgttgtaaaaatcgacgacctgcgcccgattgtcgcgcaacgcctcgggcgtacagacatcttcgattcggtagttggcccacagcccgtcggaatcgcggaaagtagccagtccgctgtcggcactcacgccggcacccgtaaaaacaacgatctttttcatcgggttaaagatagcgtaaatttcagaaaaatatcccgcatcgtcctaaaaatccgttccgccggagtgacaccaagaaaaacctcccgaacgggcgcccaacagccgagtgtcgaaaaccgcaggtaaggaccggcagggaaacaccgtacccgcgctgcgtatccggccggacgaagttaccgccgggctcgttccgccaaccaaacaggaacgatcacacagactaccgtcaatactttactgacgatttccgccgcaccctccaacaccgtacgttcgccttcgacgatccgtccgatgctcggagaaaagacggcatagcatatcgcagccccaccgcaaagaacccacagccaccatcgcaacccgcggggagcaaaccgatccccggaagcctgttccggattttcagcattcgaatccgcctccggatcgggtcccgttgcggcccagacgcccaatatccaaccgaatacgcataaaccgccggcgatcgacgcccgcaccaagctccgctccggagtcgattctccgccggaaaccagcagcagcaatacgactccgaaccctgccacgaaagcgggaggaagtccgatccacaatctgttacggataaacatgcgaaacctggccctactcggcacaccgtttatttcgagccattttctccgctcccgaggctcccggccgtcgctgccgggacgccaccgcataaaactgattcgcatagattcactctttttcgggtttcggctccggtttcccgacccgtgattttttcaggcggccgcttctgcgcagagcttccatgatgatccactgcagttggccgttggtgctgcggaactcgtccgcagcccaccgctcgaccgcctccatcgtagacgcatcgacacgcagcacaaaactcctcgtcgcctccttcgccattgtccgatcctaatgatgcaacgtacctgcattgacgatcggctgtgcggcctcgtcggcacacagcaccaccagaagattgctcaccatagccgccttgcgctcctcgtccaactcgacgatccggtcgtcggccaaccggtcgagagccatcttgaccatcgtgacggctccctcgacgatcttctcgcgggccgagataatcgcatcggcctgttggcgccgcagcatcacggccgcaatttccggcgcgtaggccaggtagttgatgcgggcctcgatcacttcgataccggccatcgaaagacggtcgttgagcttggcctctagctgatcgttgatctcgtcgctgttcgaacgcaaagtcagttcgtcgtccgcgacgccgttgttatcatacgcataataccccgccacctgacgcagcgcggcatcgctctgcacgctgacgaagttttcgagcaccttcatacgagccgaagccgaaaccgcaagatcggtgccgcccatcgtcgaagcgtcgatgtcgaacacggcccggtagatctcgtccggacggattttccacaccagcaccaggccgatcatcaccggattgccgttcttgtcgttcaccttgatcggctcgacgttcaggttgcgggcacgcaccgaaattttcttgcgtcccatgaagggattaatccaccagaaacccgtttcgtaaaaagtccccttgtatttaccgaaaaacataacgacacgggcttcgttgggttcgagcagcataaatcccctgaaacagaacatacttataaaaaacaggcatacgccgcaaaccagcatcgcagtccgcagcccaatgcgcggatccatttcatcgctgccgagcacgcacagcgcgatacctccggcgatcaacaccagcaacccgacgagcgcgacgaagccgttggcccgccaacccgaatagacaaaatttcccttttccataaccatcctgtttttatgatattattttgatattacaaatatatcattctatttttaattacgcaacgatttttcgtaaaaaaagctccgcccgtctgaaaattcagacgggcggagcttacaatgcctcggtcacgggaagaggctaaccccgcaagccgggcgatcagcgggaatcccaacccaccgcatcggcaccgccaccaatcgggacagccctttgctgccgcatcactcaatcgaccttacgcagcacgatatccgacacagccacgttcaacttgactccatccatcaccactgaaggccggtatacaccgtattcgaactcggcacccgatacgtactgcttgatcgtaagcgtcctgcggtcggacgatacctccaccggaaacgatgccggcgcgagctggtacttatcgtaatccatgcccacgaaaagaagcggccagtctccccagttatacagataaacactcttcgacgaaggcaccgtcacctcatcgccctctccaatgtggaagaagattttggccccgtagtcacggtaagccagttcaggtgccgcgctgtaccaggaagattctctcatcaaatcggccggagaataatagagcggctcgcccccctggaacggatagccggtcagcaccagcatattccgagcacggtactccttacaagtcttatcatcgactccggcttcgatcttcacttcgacatccttaatctcctgaggcatatcattatagtccagataggaataggagatcgtccaggtacccggaagcacgtcgaacaactcggactcgacacgcgcctcggagggccagtcgtccatccgcaccgtcacccgtttataaacttccacatcctccaacgaacgtacggcgacgatgcagacatactccatgcccggatagaggaattccacctcgatatcgtaaccttccgccgtattgacctgctccatctcctggatgttcaggtcggtgcctacgtccgaaataatttccttgtcacccttaccctgcgcttcgtaattctttacctcggcggcggccaaaacggcgtaacgtcccagataagctatatcgctccgaatgcggagattcagcgtctcggaaggattcgtatcggatttacgggcctcgacctccagcagaggcacccgtcccgaggactcttcagtcgtgaacggtaccaactgaagattctcgcccccggaaaaatcgacgctcaccacgccgcagtaatattccttggagggtttcagaccctcccacacttcgctcgcgaccgcctcgtatttcctgcccagtcccgcatcggtggcatacttgatcatatggatcgccatcgcctcgcctccgttgttctcgatgatgttcgtataccactccttatcacggacatatacgtaatattcggcgacaccttcgccaggcgaggttccgaccttcaccgacgtagaggcgatttcggtcaattccacctccacttccgcaccgctaccctggcggggcagcgtctcgaaatccagccgctgaggctccccggtgatattgtacgatgcgtcgcagggcgccatcagaatgacgtacggaacacccgcgatgaccttcatggagaaagtcccgttttcggcggagaattcccctccgtcgacccagtcgtattcggcctcgccccggccgatgcaacccgcctcagtgaggtactcctcgatggtatacgtattcagcgtggccgtcggaatcgcggcgaaaaagtagggaccctcacaacggatagagaacgtaaaccggtcggagccgatgtccgacacctcgataatttcgttcgagttcacccctgtcgtaaaggcgagctccgccacttcgctatacagcgtctccgccttcacggccgcataaagcacataggaacagcccgtctccaaaccggtcacggccaccgtagtctctttattcacggtaccggtgtgctcgtcgaaaagcgatgcggcgtcgggcttctctatcccgtcattctgcgtccgtttcacgacctgataaccgtacgccccgtccacattcgtccgcaggcggaacgaaaattcggtctgacccgtcgaaacgctctccaaagtgatctcgggagccgctgcccccggatcgtcgttatcatcgctgcatgcaaccgccgccgacaggagcaacgcgccacacacaactccgcgcaaccagaatccaaagtgctcgaatatcgtttttttcatagcatgaacttcaaagaaaaatccggtccggcatctccccaccattattctccgaatctcagatgaaacagaaaacctgcattcgccgagaaataccggaccggaatatgtatccgaatgttatttattcaaaggtttgtactcggttttcgtgttgccatcttcactacggactcggaaaatgaggcaatatccctgtcctgcaacgaaaggaatgagcgcagtgacatcggcgccttcgggtgaacaaatgccttcgacatcggaggagggacgccaactgatccaaaagtccccccaatcctcagggccgtaaccattcgcgatttcctcatcgatttcggtctgcgtgtgagcgccgatgcgatacgatgtggccagggaggccttgacatgaaccgttacctcggcagtaccgtcgccgttgtccgtcaggttcttgatgtcgcccagcgtcaacgaaatttcggtctccggagtctccgtgcggaattccgccttcgtatatgcatagtcgtatacctctaactggtcatcattgttcgggtccacgtaaaacgccaggatcacgtaatcagtcttgggcttcagatcgccgtcataattgctccactctgccgtaccctgcttggcgatcgacttcacgtagtccgacatcgtcatctgcttatcaaccgcaatattgttcaggccataataaacgccctgaatatacgattccggctcgaaactctcataggtagatttcgtcgtaatccaggcgcaataccattcgtccgcactctggggtgtcacggtaaaggtcacccccgtagtcgtaggctggatgttcgtaatctggaactggtcgggaacgtccggagccttggtcgtcaggaactcataataaacgacttcctcatcctgagaaaggtcgtaagccgccactacgtacgagtagctcgacgaaagtcccgatagcgacctctcgtacacacccttctgggttttgttcccgatgtaggggtcctgtccgtaatattcgatgaactcccagccttcaagcatctttccgtcacgctcgacctcggatttgggaaacacgttcacgtagtagtccaccgtatcgtcgctgggcgtaaccttcaccttagccgaattgtgggtgatatcggttaccgtgatctcgattttgaaatcgcccggcgtcggcccatcaccctccttctgcgtcctgacggtcttcttgaccacagctccgacttctttattctgatagctgaaaaccaccaccgtataatcggtatcagccttcagcccggttgccgaaacatctttcttgcccatgtaaagacacttgtcgaaatccgaacgtgcgaccatttcggcaacaagctcctcgtcggcaagtccttcgacggaggaagattccgtcactcccgcaaaataggtcgttttgtcgtccgacggcgtaaccgtcacagaaacggaattagacgaggcttccggcgtcgcgatttcaaacgtaaccgtcggggggggggnnnnnnnnnnnnnnnnnnnnnnnnnnnnnnnnnnnnnnnnnnnnnnnnnnnnnnnnnnnnnnnnnnnnnnnnnnnnnnnnnnnnnnnnnnnnnnnnnnnnnnnnnnnnnnnnnnnnnnnnnnnnnnnnnnnnnnnnnnnnnnnaattaaattttttcataaatacaaaggttttagtttggttggtaaatagttttttttcattacccaaatatatcatttttattttaattatgcaacgatttttaattaaaaaagctccgcctgtctgaaaattcagacgggcggagcttgcaatgcctcggtcacggggacaggctaaccccggaagccgggcgatcagcgggaatcccaacccaccgcatcggcaccgccaccaatcgggacaggcggatcgcggtcgcaaccatcgactctccccggctacacgtgcagcggttcgacggggcggatgcaggatcgagtttctgcggatcagtgcgtaaatacgcggcctttctgcttgatctgcttctcgtatttgatacgggaatcggtcggatactccagcttttcaagctcggccacagcgttcttgatgtcgtcgataagcatgtcgatcatatcgcgcgacgtaccctgacgaacgaccacacgcattacgaccagattttccaggttctcgggcattgtataggccggaaccatccacccgctctgctgcaacagcgcctgcagatcgtagagcgtccacttggccttcttgtcgtaatcgggattcatataccagatgaacaacggattgaccagcttgtcggcatagttgcggaagcacttcatcttgccgatctgatcgtggcaataagtggcgatatccatcgaattctgctgaatctccttgtagccctcgaatcccaggcggaggaaattgtagtactgtcccagcacctgggccgccggacgcgagaagttcagaccgacctgcgtgatattcgcgcccaggtaattgacgctgaacgacatctcatcgggcaggtatttcttgtccttccagactacccaacccaggcccggatacaccagaccgtacttgtgacccgacgtagagatcgagagtacccacttcaggcggaagtcccatttcacctcgggattcaggaacggcaggatgaaaccgccggaagcggcgtccacgtggatcggaatttcgaagccggtcttcttgttataagcatcgagtgccttgtcgagcgcctcgacatcgtcgttcagacccgtccaggtaacaccctgaatcgggacgatacagatcgtgttctcgtcgcacatggcgagcgcctgctcggggtcgagcgtcgggttcttcaacgtcagaggcacggtgcgcagttcgatttgccaaagctggcagaacttctcccacaccacctggaaaccggcgctcatcaccagattcggtttgtcgaacggcttgcccgcagcctggcgacgcttgcgccagcgcagccacgcagccacaccgcccagcatacaggcctccgaagagccgataccgagggcgcctgccttccactgcgccttctccggagtattccaaagattggcgatcatgttgatacagcgtccattcataacggcaatgcggggatactccgtttcgtcgatatagtttacactgattgcttcattcataagtcgggtagcgtattcgtccatgtaggtagtcacgaacgtcgccagattcaaccggggctgagtctgggggtaagtttcgtctttgacgatctgatatgcaatttccgggcgcatcattccctgggggatcacatcggtgggagcaggctcgagcacttctttcgatccgaaaactgtcgtcagcagttcatcattgtttcgtttctggttcatacgctataattattttggttcgtaacagaagaatgacacaaactatgccaggaggcaatcccgcctccaaacattttcagaagacatccggcacattcgcagataaaaccccgaaataacgaaattcaacaacccggaaacatactttcgaaaaggtcggacgcactcggcaaagccgccggacgcaccggtcggactctgttcccgtttttatcgcccccgcagaagacagggagcctccggcataaaaaaaacgaactcatttgttttattctgttctcattttcactacctttgtaataatttttatccaccctttataaaataggtaaaaacttttgcggcatggcagcatattttaacatttttttgatcgtcatggccctgctggccttggcggtttacatcgcactccattatttcgaggccggatacggctatctcttcaaccgtaaatacggcttcccgatcccgaaccggatcggctgggtgctgatggagtgtccggtattcatcgccatgaccgttctctggctcctctccgaccgcacgtgggaagcggcgccgctggccctgctgatcctgttccagggacactacctgcaacgggcgttcatctttccgctgctgatccggggcaattcgaaaatgccggccggcatcgtgggaatgggcatgctcttcaatacgctcaacgccctgatgcaaggcggctggatcttctacatctctcctgccgactattacgaaggctggttctccaaaccctatttttacatcggagccgcactcttcgtcgcaggcatggtcatcaacctccattccgactacatcatccgccatctgcgcaagccgggcgatacacgccattacattccccggggcggtatgttccgctacgtttcgtcggccaactatttcggagagctgaccgaatgggtgggcttcgccatcgcttcgtggtcatgggccggggcagtattcgcctggtggaccttcgccaacctcgccccccgcgcagcttcgctttacaaacgatacgaaaaagagttcgggcaggaattcacctccctgcaccgaaagaggatcatacctttcatctattaagttttcaattatgagtaatttgcaggattccgtactcttcacgccctatcgtctggggcaggttacgctccgcaaccgcaccatccgttcggcagccttcgaatcgatgggcaaagacttcagccccacgcagcagctcaaggactaccacgtgagcgtcgcccggggcggtatcggcatgaccacgctggcctacgctgccgtctgccgcagcgggctctcgttcaagagccagctctggctgcgcccggagatcgtcccggcgctgcgcgacatcaccgacgccatccacaaggaaggcgccgccgcttcgatccagatcggtcactgcggtaacatgacccactactcgaccgccggacagattcccatcggggcttcgagcggattcaacctctacgcctacacccccgtccgcaaaatgcgccgggatgaaataatgcaggtttccaaagacttcggcaaggccgtgcgaacagctcatgccgccggtttcgactgcgtcgaggtgcacgccgggcacggctacctcatctcgcagttcctctcgccctataccaaccaccgccgcgacgaatacggcggctcgctcgacaaccggatgcgcttcatgcgcatgtgcctcgaggaggtgatgaacgccgcccctgcgacgggcacctcggtactcgtcaagcacaacatgtacgacggattcaagggcggcatcgagattccggagagcatcgagatcgcccgcgaaatcgagcgctggaaggtcaatggcatcgttctctcgggcggtttcgtaagcaaggcgccgatggccgtgatgcggggtctgattccgatctacaccatgagctactactcgcccctctggttgcgggccttcatccgctactgcggccccttcatgatccggcagttccccttctcggagtgctacttcctggaggatgccaaaaaattccgcgaagcgctgcaactgccgctaatttacgtgggaggtctggtgagccgcgaaggaatcgagcgggctctggacagcgggttcgaactggtgcagatggctcgggcgctcgtgaacgacccggctttcgtgaacaagctgcgcgaaggcgatgcggcgacccgcagcgagtgcgaccaccgcaactactgcatcgcccgcatgtattcggtcgatatgaaatgctgcaaacattgcggcgacctgccccgaaaaatccgggaggaactggcaaaactaccgtaatgacacgcaagggaacgatcgaaaaagggagccggaccgctctggtgacgggtgccggcagcggcatcgggcgctgcatggccaggcggctggccgaactcggataccggctgatcctcgcaggactcgatccggcgaaactggaagccgcagccgaagaactccacgaacaatacggattggcggtagaggtcatcccgatcgacctggcacgacccgaagccgcacacgaacttttcgagcgggtacaggctctcggccgtgaagtcgatgtcctggtcaataacgccggagctttctcgttccgcgacattctgcaaacacccgtcgagcggatcgaaagaatcctctgcctccacgccctgaccacgaccctgacctgtcggctgttcggcgccgaaatggcccgccggggctgcggaggacatatcctcaacatggcctcctactcgctttggatgccctggccgggactggcgctgtacagcgccagcaaatcctacctgcgtggtttttcggtagctttcgccaaggaggtgcgcgaacagaacatccgtgtcacggccgtctgcccggcaggtgtggccaccgacctctacggactgccgccccgctggcagcgtatcgggctgcggctaggtgtgctcatcacgccggacagttgcgcccggcgagccttgaaagccctatggcgaggacgccgctgctgcgtacccggctggtggaaccggcttttcatacccttctgccgtctgatgccgatgtgcgtactccgggttgcccgcaagtacacgatgaagcttcaacgctaacacacagaacccgataaaaaagaagatagacggccatgaaaaaatggatcaagattctgctcgtcaccctcggcatcatcgcagtactcgtcgtgacgacgattctgctgttgcctcccatcgcgaaaaactaccttgaaaaacacagcaaggaactcgtcggtcggcaaataaccatcgaaaagttgcggttcaacgtactcaacggcaaacttcgcatcgaccggatcgccatgctcgagccggacgactcgacgacattcgcatcgctgggaaatttctatactcgaatacacctgctgcccctgctgcgccagcggatacacatcgacgccgtactgatcgacaaaccctacctgaacgtctatcaggatggcaccagcttcaatttcgacgacctgctgaaccgattcctgacccctgcggacacagtcgaaaaggccccgtcgaacccctggacagtcgatatcgacgacatcaagatacacaacggcgagctgacttacaaggacatgcagcgtaacgtcacgtggggcttcaacgagctcgacatcgacgtaccgggactgcacctctccggacacgaacggacggacatgggcatcgtgttcaacttctcacggggcggttcgctccgcacctcgctggaatacgaccaggcgacggccgactacgacctcagcctgctgctttcgaacctctcgctggcaggcacggcggcctatttcaatcaggtgatcgacatcggctcggtagagggcctcgtcacgctcgacctgcatgtgaaaggcaacgccaaccacctgctcgacctgcgcacgtacggcatagcggccgcatcggggctgaaactgcgcgacagccgcgacaaccggatcatcgacgtcgatacgctcaatttcgacctgcgggacggcaatctgggcacgatgcagtacgatattcgccgaatctatgccgccggcatccgcacccagttcgaaatctaccggggcggcggcaacaacctgctcgctctgatcaaagctcccgaagagcgtccgacggaaacggaagcgaccatcgacggtgaaacgaccgtaaccatcgaacgcgaagaaccggccacgacgcagctcaatttcaccgtcggcgaactgcttctggacaagggagagatcgccttcacggacaacacgttcgaaaaaccgttccgatacctcatttcggacatccggctgtcgagccgcgacatcgatttcagcaaacagaacgaactgacgctcgacgccaaattgcaacgcacgggatcgggccatatccgttggaaaggctcgcttcagaacctcgacaaccacaacctcatggtcgctctgtcgaacatcaacctcaaggatttcaccccctactgcgaacatttcacggcctacccgctcacgggcggcaacctcacgttccgcagccaaaacatcatcgctgaccgttttctcaacggcacgaaccacctcgacatatttcaatgcgaggtcgacaagaaacgcaaggacctggagcctgaattcaagattccgctcaagctgggactttacattctcaaagaccgcaaaggacacgtcaagatcgacctgccggtgaaaggcaacctcgactccccggaattctcctaccgcaagatcgtgatgaaggcgctgggcaacgttctgctgaaagtcgtgacggcacccttctcgttcctgacgggcggaggcgacaatctcgaccgcatcgaggtcgatccgctgcaattctccctcaatacggatcaatacgccacgctggataaggtggccgacatactgcgcgacaagcccgaaatgcagataggcctcgcgcagcggatcaaccgcagcaaggccgtcggacggctggcagaactgaatctcaaaatggcctgctacaactcgacccttccggcgggcgagcggctgtcgatgatcgacttcgaacggatccaggcgaccaaactcaaatcggacgaagtgatgcgcttcgccgactcgctgctcgccctgcgcggcatcgacggcagcaaactctccggcagccggaaagccctcacgctttacggagaccaggccgtcggacagctcgaaaaaattctcgtccgccgcgacagcgcgatcgtcgaatacctgacccgatcgcagggaatacccgtcaccgcgatctcggtacggacgattccggcacaggaactcggcgattacacgggaaaagatatttatgccatccagctcggtatggaggaagagagcatcgacgtaacggacggcaatacggcaggcgatacggaaacaacggatacatcggcttccgcgacggcggaagtcctcgcgactgtaccggaacaggcggcggtacaactcacgcaaaccggaactgcgaaggaaacggcgactcccgaaccttccgctccgacggcaacagcgacgcagtccacccaggccgagactacgatcaccgaatccgaggccggaattacgacgataaaaaccccgacagcacatccggaagagctgcaaacgaacgaataaccggaaacagaccgaacaaacaaacgacgtaacgggcacgtcggacggacaaaccacgacagcgggacaacggtgctaagaacaaggccgccaccgaaaagctcctgcaaccgggaaaaatccgtcggaaatttcaacgaagaacatcgctgaaacccgaagccgggtcctgcccggtgcattcggccggataattgccgacaggccataacgacactacgaaacagaccgacatgctgcaaggaatcgaaaatatcgtattcgatctcgggggcgtgatgatcgacctcgacagagcacgctgcgtggaggaattccacaagatcggattcaccgaaatcgacgatttgatcgactcgtaccatccgaaaggatttctcggacggttggaacggggcgacgtgacgaacgacgacttctacgactacgtgcgtcggagcgcaggacgcgacatcgcggacgatgaaatccgccgggccttcacctccttcctggccggcatcccccgctacaagctgcaaatggtgcgcacgcagcgggaacggggattccggacctatgccctctccaacatcaacgacgtggtttttcctttcgtgcgagacgttctcttcacccaggaaggtttgcaactggacgactatttcgagaaagcctatctttcatacgaaatgcacgaattgaaaccctcccccgaaatttaccgcaaaatgatcgaaaagagcggtatgcgccccgaagcgacgctcttcatcgacgacaatgcggaaaatcttcacacggcgcaggaactgggattccacgtatatatgccccggccccgcgaagatttcaggtttctgttcgacgacggcccgggcagatgataccaaaaacggaaaaccgtcatccgaaacgaacggcacatcgctgcgatacggggaggacattcggaataattcgaaaccgactgcaagcggttcgcttgcaataacaaaacgttccgggataacggacggtacgtcgtggcacacgcgaccggatattcgaaatccggcctgaaaaggtcccgaaacggaagtcgggaaaaaggaatctctcttcgaaaagataattttagccggaaaagtttgttataaacaaaaaagaccttatatttgcactccgaaatcgcactgatttccgcaatcggcgggacacacctcgcaagaggtccccggattgggaacggggtgtagcgcagtccggttagcgcacctgctttgggagcagggggtcgtgggttcgaatcccgctaccccgacgaagaagcctccggaaaaagacttcttgcgtagaggctcgaaaaagagggaaatcagttacggtgaaaaatattgttcggggtgtagcgcagtccggttagcgcgccagcttcgggagttggaggtcgctggttcgaatccagtctccccgacaaaaatcaaaacctttgccttaaaaggcaaaggttttttactatgggcatacgacggctattcatcgccgaaagtaagggtacaagaaaaaaggattccgctttatcaagcggggtccttgatttttgtacacccaataagagactcgtccggaagcgaagcagagcgacgcaatccagttttcccgaccgagagaagggatacgaaaacattccttttttcatttccggacagcgacatgtcacacggcaaacgaacagcgataaaaaactgcctgcggaacagcttttgtttgtgtatttcccatcaaggagctatttgacaagtcgcgaagcaacgcaatccagattcttatttttattttccaacggcaattcgtttatacaaaggcggatgaagataaaaagtcattcgcgaacgacttttcttcgtttcgtccaagggttgctgctatcgggaaagtggagaaaagcgacgcaatccgaggcttcgaaaaatcagagtaatctttcctttacgggaatttttatcgtcgtaaactgccgttgtagtcggcgaaaggccacacggacacaaagagtttcatcagggagttctcaatttcaggtctgcccctcttcttccgaaaaccgccatatcatccggcttttcggcaaaaccgggactgtagcttacaggcaaggtttttcacagccacccaccgaacgcagcggctgcccgactgcgcatcgaccgtctatcggaaccggcggagcatcttcccgaaatccagtaatgcacggggcacaaaatttgcggattacccaaacacattctatgatttaccgatatgaaactgataaaaaccatcgaagaacgatggagcccccgctcatacgactcccgtcccgtcaatgaagaacaactggcattgctgttcgaagcggcacgctgggctccttcctgcaacaatgcccaggagtgggcatattactatacgactcgcgaatatccggaagctcatgcccggctcgcggagtgcctcaccggaggcaatcgagcctgggcgcccgatgctccggtgttgctggtttcctgcggatacaagaatttcccggggacggatgtctataaccggcactggatgcacgatgtgggcgccgcgaacatctcgatcgccctgcaagccgcctcgatgggaatgcaactgcatcagatggccggcttcgacgtggaagcctgcgcccggctgctgggcctcgacacggaaaagatcgaacctgtaacgatgatgacgctcggctaccccggcccggccgaccggctggcggagccgttccgcacccgggaaacgctgccccgggaacgcaaggaagtgaagagcttcgtacataagctcgaataagaccggaacatccgaaccggaaaaaaccgtccgcctcaccggacataacgcaaagagaggctgtttaacaagtccgattttaatgctccgtcggaatgatcctgacagggacgattttcaatttcagggacctgttagacagtctctctcctattgtgtttccgactattgcaatcgcttgtagtgacagtacatcagatgctcctggtcgtcgtgcaggtgcataccgccgcccagacagaaacgccacatcttgcaatcggcgcactcccctttgcgggcccattcgcggtcgcggaacttgtcgaagcgattctgccacacgtcccagaaactgtcccggtaaatattcccctgatggaaattggcccggatggaggtacagcccgaaatcgccccgtccacccggatcgaggcagccgaaaccccggcggcgcactggtagaaatcgtcccgcacctcgccttcgtaaccgcccagaaagccttcgcaggcgtaactcaagtcgatgcgtccctccttacgggtacgctttatgaactccagcacctcgcggaactgtgcgtcggtaaccgcgagcgtcggatcgtccttggcccggccgacagggaagatcgagaagatgcgccaatatttcactccttcggcgatcaacagctccttgaactcttcgagtcgagcgaccatcggcgaagtgacgcatgtaatcacgtcgtaggtgagccggggctccctcacgatcaaccggatcgcgtcgagcgccttttcgaaactgcggggattgcgccggatgtagttatgagcatcctcaaagccgtcgaaactgatcgaaatggatctcaaccccgcatccatcagacttcgcaagcggtcggcgtcgagcgccagaccgttggtcaccatcccccaggcatagccccggcgggtaacctcccggccggcttcctccagatcgctgcgcacgagcacctctccgccggaaaagatcaacagaacatcttccgggcggttgtggggcgtaacctcctcatcgagcaccttcaggaaatccgccaacggcatatccggcacgccgggatcgacccgacagtcgctgccgcagtgacggcaagccaaattacaacgtaacgtacactcccaaaagagcgtacgcaacttgtgttcggcgatcttctccgcataaagatcggaaaaaaggcgcagcccgatacgcttgcgcaacccgagctttcgtcccgtcatcggcgattattcgtttttggaagccggagcctctttctcacgggcccgttgtgcctttttaacctccttgcgggctgtcttctcacggatggcctgctgacgttcgacctcctcgacaggtaccggaggacgcacgccgtacatcaggcggatctgtctttcgacccgggccgaatccggagcctggtcctgcggccctccctgaggagcgttcttcactgtcgaacaagccgttgcaaaacccagcatcgtcaatagcgcccattttactttcttgcccatagctttcaaactttttacagataatacggatgaacaaatataactattttttcgaggaacaaaaaacgtgcaaaaataattgcgaaaaaattttgagaatcaacactttttacctttctttgctgatacatttttaatcaatattcatttatgacaggtcaagttaaatggttcgatagcaagaaaggctacggattcattacccgcgaagacggcaaagaggtcttcgtacatttttcaggcatcgtatccgattctttcaaaacgctgaacgaaggacagaaagtcgctttcgaacttggaaacggagctaaaggcgaacaagctataaacgtcaccgtaatcgagtaatccatttcattactccccaaaacgtatggaggctcccccgggaagcctccatattttttccggtacgaacgaaataattgtattttcggcacgttaatttcatgctgtcaatgagctataaaatcagatacgatatgaccaaacgaaacgaagcgatcgccattctcacgggcggcggcccggcaccgggcatgaatacggtagtgggcagcgtggcaaaaaccttcctgcagaagggatacagcgtcatcggactccacaaaggtttcacggggctcttccgcgaagcgcccgccacggagaacatcaccttcctcaaagcggacgaaattttcaacctcgcgggttcgttcctgcgcatgagccgcttcaaaccttcggacgaagatttcgagaagcgtttcaactggcagttcttcaccgagaacaacatcaagctgctggtgaccatcggcggcgacgacacggcatcgacggccaaccgcgtggccaaatttctggaagaaaagcgtcatccgatcgctaacatacacgtcccgaaaaccatcgacaacgaccttccgctgcccgactgtgcaccgaccttcggctacgaatcggccaaagacaagggagcggtgatcgcccgggccgtctatgtcgatgcccgcaccagcggcaactggttcgtcatgtcggcgatgggccgcagcgccggacacctggccttcggtatcggcgaggcgtgccactacccgatgatcgtcattcccgaaatgttcaacaaaacgccgatcaccatcgacaagatcatccgtctgatggtttcgtccatcgtcaagcgccggatcgtcggcatggactacggcgcggcggtcatctccgaaggcgtgttccacgaattgagcgaggcagaactctcctcgtgcggcattcacttcacctacgacgcgcacggccatcccgaactgggcaaagtgtcgaaagcctgtttcttcagcatgctgctcgaccaacggctcgcggaactgaaactcaacgtacagacccgccccgtggagttgggttacgaaatccgggggcagacgccggtggcatacgacctgacgtactgctcggagctgggtatcggcgtttacaagctcttcagcgaaggcaagacgggctgcatggtctatgtggacggctgcggcaacgtcgaacccctctacctgaaagacctgcaagaccccgcgacgggcaagatcctgccccgcatggtggacatctcgtccgaccgcttcaaagccgtagtagataatatcctgatggctattaccccgcccgactacgaagcggcacgccaatacctgtccaaccccgaggagtacgacttctgcaagatcctcggctgggacgaaacggatctttagctcccttttgtaacggcggaaaaacggaaatcatacacttcggcgcccggaatatcaatattccgggcgccagtctttcaggtcctgcggaccgccgcaagacatctttatcattcctcatcccggtctgcccagcgttcaagcgtctgacgcacggcctccttatagtccttgtcggtaatccggtaagtccagcgcacggcgttcgggcggtcggggaactcttcgagcacccatgccgactgatcgcgcggtgtgccgcgttgcgattcggtcatagggtcgaagaaagagtattgagcgcacgtatctacatctggggtaatggcatggtaattatcttccgttattgggggcacattgaaatataactgaacaaaacccaacgcatccagatttttcaccaacacatcgttatcgtctatccacaacattttctccatcatctgtccccatgtcccctgttctcccggggcgattctaatcatatcaccgctcgcactcattttagttgaaatgaagaaaatcgcattctcctgactggcgttctgcattcgaaaataagtgtaataacagtctggatattcttcgccgatattctcttccatcgttgtgttcttatccacgaactccggtttttcgggcttcggtgtgggctgttcttccgacggagcttccggtgaggtgttttccgctttgtcggaacagcccagcgaagccaagaacaggagcaaggctcctaacgataaatagacacgtactttctaggttaattattaagggataaaattcgtcctgcaaaaaatattgagatcgaacgccccctgaaacgaatttaacaaaagcgctgaaacaaccgattgttctgccgatcatcgaggaacatccgatcacttcagatcgaaatcgtcggcatcgcgccaggcgggaaatttctcgcggaaacgacgcagctcgtccatatcgagccgtgcggtcaaaagcctctgcccctcccctgcttcggcaagggtttctcccttacagccgatcacggccgaatcgcccgaataatgcagccgggggtcgtcccccgtacggttcacccccaatacgtaggcctggttctcgatcgcccgggcccggagcagcgtccgccacacgtcacggcggcccgcaggccacgaagcgacgtaaataatggcgtcgtaatcgttccggcagcggctccatacgggaaagcgcaggtcgtagcaaacctgaagcaggaaacgaatgccgccgtattcgacgacgacccgctcccgtcccggacaaaaattagctccttcgccgccgatggagaagagatgccgcttgtcgctctgcacccgctcgcccgaaggttttatgaaaagcaggcggttgtaatagcgcccctcctcttcgacgatcagactgccagcgacggccttgcccatcgtccggccccagcgggtcatctcctgcacgatttcacccgacatcggttgcgcgacccgaccgggatcggtctcgaatcccgtagcgaacatctcgggcaaaatcaccagatcggcatccgcttcggcaaccattctcccggccgtccgcagattggccgccgtatcttcccacaccatgtcgaattgacacaaagccactttcagttccatatcgccattcgtttttttactaaaataaaatttcccgctactcgcttcttttcgttcgattatcctaaatatttgtcaagaagaagagcaacagctattgcaaatgtaacacaagctgctgttaaatttctaaatgttccaccgtatgtattagaatgatcgttccactctccgtgttctttgtaatatttataatccacattatagaatgttataagattaactatacaaataataaacaagagtaatatcatagtttgtttaattattgaataatctgtaatatattcaaggaggggagcaggcttgaaatattaattgttgtgaagcagtcattatgattaacgaaataaccacaaccccaatatatacttgaaaacatcacaccatatacagctccccatttatatttcaaatatacaaaaagtctggtacaaatgaaaattcaattccgaaccacatcgcatctcacgacaagacgaaatattccggaaccgaccccaccgcccccaggaacttcgctcaaaaattgctttcggcaaaaataaaacgtacttttgtcaagataaaacacccattatgctcaaagcaggacgcacacaaaccctcaccgtaaaccgcatctcggactacggactctatctgatcgacgacgagcagaacgaagtattgctacccaaccgttatgtttctctggccaacaaggtcggcgatacgctcgaagtattcgtctatcacgattcggaagaccgattggtcgccacgaccgaaacgccgaagctgcgcgaaggagaagcgggattcctgcgcgtagtggacaagaacctgcacggcgcattcctcgactggggactcgcgggcaaagacctgttcctgcccaaccgcaaccagcagggaggcgtgttggccggacggaactgcctggtttacctgtatgtagattcggtaacggggcgctgcgtggcgaccatgaaattcaaaagctacgtcaataacgacgttatcacggtaaagccccgcgaagaggtttcgctgctcgtggcttcggaatccccgatcggctatcgggtgatcgtgaacaaccgtcactggggcatgatctaccgcaatcagctcttccgccgcatcggtgtaggcgaccgtctgaagggatacgtgacacgcatcacggaagacaaccgcatcgacgtcagcctgcaacagcagggagtcgccgaagtgcgccattcggcggaaacgctgctttcgatgatccgcgaaaacggcggttcacttcccctgaacgacgacagcgacccggcggaaatcgctgcacggacgcagatgagcaagaaagtgttcaaacgctcgctgggcatgctcctcaagcggggtgcggtggaaatcacgcagaacggtgtaaaactgaccgggcacaatggctaaaatactcacggcggaacgcgtatcgcgcgacatatcggacaactacgtattccaacgttcgcaactggcctatcacgaggcggcgcggcgaatcagcggcgacgtactcgaaataggtacgggcgcgggttacggcatcgaaatagtcgccccccacgcctccagctttctcacgctcgacaaaatcgaacctgcgggcgaacggcctccgttcccgcacgtggagatgcggcaagccgtagttccccctctcgacctgccatcgggcagtttcgattacgtcatctcctttcaggtgatcgaacacatcaaacacgacatggaactggtgcgggaagtgcaccgcgtactgcgtccgggcggcaagttcatcctgaccacccccaatatccgtatgtcgctgacacgcaacccctggcacgtcagggaatacaatcccgaccaactccgcaacctgctcggcagcgcctttgcgtcggtggaggccctcggtgttttcggcaacgaacggatcatggaatactacgaaaaaaaccgccaaggcgttcggcgcatcacccgtttcgacgtgctcgacctacaacaccggctgccccggtggatgctgcaactcccctacgacctgctcaaccgcctcaaccgccgacgcctactccgggacaacgactccctgacccgtttgatcaccatggaagactaccgcatcggaccggtagcggacgactgcttcgacctgttctatatcgcggaaaagcaacacaaataaatgattccggccggatcgacatccgccggcaatccggaaaaaaccattataagcagcagccggaatcctcatccattttaagttcattttacccgatccaatcttaaatcgttaattctccacgtatcgaacaccaactccaataatattttttgcctcgcctcaacagacgacttgttccaaccggtaaaattgtattggaaatcatttttgaatcgattcaaggctgtatttactccgatataaaatttactatcgagtaatttcgtcagacaaacagacgatttgccatactccgactgcttgtcataaaaccattgatctgtcgataaatcattataattattcacggcctgattaatcatgctttcgatcaacgtgacattacccaatcgatacacataggagtaatactcctcctcggacaaaaactccagtggaatacttccatttttcggtgattgaggtaaaatatgttctatttgcaaatcattataaaattgatgtccacagaccgggctgtgcaatttttccaacaccgtattttctatcttccccaatacatagcgcaaccgatacaagggattataaaccccatgactcaaagttatgaattcggctttaaatacccctaccttatccagcaaataaggtaacatcgttttctctatcacgcaggcaatttcatctatcgtcgtaagattacgtaatttctccgcccattggacaaacaaggattcattcgtcttggcttggatcctgagggtcgagctgaaaaagaaaaaactctctatttgtttggccaaatattcgattgccggcacatccgcattgcttcccaaagacaataacaggatcaaatgctgtctggatttgtatttattaataaagcctatatttgtcacgtgaggatacaagcacccatcccgctgtaattcagtggcatttacaagttctgaataccgtttggacatacagcgtatctcctttgcaaagtctaccggatgcttttcatattgcgtagcctgtttcccttcagaagatataatccatttataaatatcatcttctcgcaagataccattataatatcgggcactcagaaaatatcgcaaaaatcgtaggggtttttgatcttcagaacattcctgaagattttgaataatctccctccatatatcttttatcttggcaaaatccgactctttggtattactaaacagcaaatttttgaccaaatccatagcattcaatcccgcccctcgctgattgatcgtctcgaaaattttcaatgcactactcaaatcttgagattcgattacaacgagttctatctttgtcaagcaatatttcgcaaaatctatcaactcatcaatcccggcatataattgaaagtgtcgaagtattttcgtataggcatcctgcattcgctctatagatggggatcgcactccattgtaaggttgctcctgtatcaaggctgtcaaataatcatgactctcttcatactgcaattctaagcgtacacgggtctctcccgattcaatatcaaagttataaagtagattttctataatctgtaaataatttttctgagcgctgttcaatgtctccttttttaataaatctcggaaaacacacaaagacaacataatagttgtcaaacgctgttgtccgtccacgacatcgaaacatctatcattattgacaatgatgatagatcctaaaaaataattacgctgctcttttgcatcgggactatattcattttcaatatcgatcaaaaactgctcgacctcgtcatcgggtttccaaacatattctcgttgataatcaggcactaaaaagaaataatccttcaatttagatatagactgaactttagcatcgattttcatatcttatgatatagtttttgtaaattacgttatacaattagatattatcatcaaacgaatttttcaaaaaacgtctgggtgcgaatattctacaaatgtaggtcccataattttctacttcgcttcgtgaaaagcaatacaaacaatacaaatttaaataaaaaattggaaaacaatcgtcaatttgaatccggtacgatctaattccatacaaaaaagcagccctctcggactgcttcaggttagtataacaacccgatttgcgaacaattaatattcttcctcgttgaagagaaaatcatccttcgaaggataatccggccaaatatcctcgatcgattcgtaaatatctccctcgtcttcgatctcctgcaaattctcgagcacttccaacggcaggcccgagcgaacggcatagtcgatcaattcatctttggttgccggccagggagcatcctccagtttcgatgccaactcaagtgtccaatacataactgcaataatttaaatcattaactcacaagacaataagtccaggctgacatacagcttccttattattaggttgcgaatatataaaatcctgcgagaaatacaaatcaaaagaataaaaatttcttctgccattttttttgaacaaacatagcgataggaaacgatccgcacattccggcctcgaccgaaagagcggtttcgcaaagaccgacaatgttcggcggatccgcaaccgcacacgattatttccgaatcgcatcgaaagcggccatgtatcgacagcccctgtccgcatcacgaattcaggaattcgactgccgttatccgcacaccgccactgcctccgccggatcgtttccgacgcgtctttctcaacggcatttcaaacgcatcggccgagtcgggtccttacggcacacgaaaaaaaaaactcctcggcagatcgtacgaaattccgaaaaaaaccgataaaatcccgtcacggaatccacagggtttcctccacgctgaaatattcggtcagcgtgcggcccagcagatagaaatagtccgacagccggttgaggtacatcagtacctccggtgcgacgccatacttcgcatcggcccgaagcgccgcccgttctgctcgacggcaaaccgtgcggcagacatgacacagcgaaacgacacgatgtccgcccggaatagtgaacttggtaatcggcttcacggaagcctgcatacggtcgatcgcctcttcgagaaacttcacagcctcggcgtcgattcctttcaccttgtccgctccgccttcgcccacagccagcgtagcagcaacagtcatcaactgggaggcaatgcgtgcgagctcccaaacacggggctccaaccccacatctccccgcaaatggtccgtaagcagggcaacgaaagcggtcaattcgtccaccgagccgtaggcctccacccgttcgtcggtcttgaacacccgttcccccccgaccagcgaagtggttccctggtcgcctgttttcgtatatatcttcataacttgaaatgttgtttcggcaaatgattgttgaataccagcaaatagccccggttatcgaccgtcgtcgaacgatgctcccgaacgatccgacgacacgcttcgccgcgtgcgctaccgtgatagggattcatcacacagagcgtcgctcctgtccgggcagcccgagccgcagcagcaggcaaatcctccgccggaaaattccgggtcaggatcaccatgtcgtacggacccgcacaattcaggccaaaagtcgaatttttcgcctcgttttccctccccggcgtaacctgcaaacaacctctgccctcgtcgatcacaaacgtcgaattgcctttttcaaactctgcatccggcaaagtccgaacaggttcggctttgccttcacatatcgcaaacgtccggtagccgcaatagagaaaggcgttctgcaactgcaccgcccgccggtgaaagattccgacccgacgcagggcatcgtaaaggcagtgctctccgtcgcgcagtctatgaaacataaacgcttcgcgcacaagtccgtaaacgaatggcgagtgcacgccgtgcccccggaaatgacgggcccgggagagccggtcggtcagccgggaaataccgcgaaggcggcggcgtagattgcgtccggtccgtttcactgtttgagcataccggccagacgaccggtcgaaaaagcgatctgtaaattatacccgccggtgttggcatccagatcgagcacctcgccggcgaaatagagtcctttgactttgagcgattccatcgtatagcggttcacatcctcgcagctcacaccgcccgcagtaacgacggcatattcgaaaggcgcatagtccgaaatcggaaaaaccatccccttgaggagcttaaccaactgttcgatctgctcgggcgtaatcttgcggatgtaatttttagagtgagcgccgacctcttcggaaagaggaatgaccagcgccttcggaacgagcttgcggagcagttcggagaagaactcctcgggccccatctccgccatctcacgggcgatgcgctcgcgcaacatctcctcggtcagccccggtttcagatcgaccatcagtccgacacccttgccgtcgatcagggcgtccaccgcgtcccggctcatgcggagcgccacagcgccttcgatgccgcgctcggagaaacccagctcgccgaactcttcgcgcacggcttcaccgtcgatgcagagcgtcgcacggacattccggagcaacagtccgttcatatttttgatccagagacaggacgacaccagcggcgtaagcgacggccgcaccggttcgaccgcatgccccgtatcggccgcaaagacgtagccgtcgccggtcgaacccgtagcgggataggaaacgccgcccgtggcgacgataacgcgcggacactcctccttgcgctcgaatccccgcttattgcggtaccgcacgccgaaaacccgaccgttgagcgtcattatttcggtcacacggg

SEQ ID NO: 10 - DNA, 2623059 bp, Alistipes putredinis (residues 1,311,531-2,623,059 of 2,623,059)
  misc_feature (1289073)..(1289215): n is a, c, g, or t
  misc_feature (1544327)..(1544336): n is a, c, g, or t
  misc_feature (1551771)..(1551780): n is a, c, g, or t
  misc_feature (1837258)..(1837408): n is a, c, g, or t
  misc_feature (2028572)..(2028714): n is a, c, g, or t
  misc_feature (2064582)..(2064731): n is a, c, g, or t
  misc_feature (2078817)..(2078971): n is a, c, g, or t
  misc_feature (2119266)..(2119275): n is a, c, g, or t
  misc_feature (2148883)..(2149026): n is a, c, g, or t
  misc_feature (2220511)..(2220652): n is a, c, g, or t
  misc_feature (2393497)..(2393671): n is a, c, g, or t
tatcataaacgatcttcacgccgttgtccacgcaatattccagcagtgcgttggcaatatcccacgccttgccgcttcgaggaaacacccgctcgccgcgttcgacatcgagcttcacgcccagccgctcgaagaatctgatcgtagccctgttgttgaactcggcgaaagcggtcgaaaaaaactcggcattggtacgcacctgtccggcgaactcctcaggcggccgggcattggtcacgttgcagcggcctttacccgtaatgcgcaccttgcggcccgatttctccatcttttccagcagcagaaccctgtgtccgttccgtgcggcagtccccgcagccatcatacccgcagcgcccgcaccgacgacgatcacatcgtaaggcaggcgaacggcagccccttctttctgacttatctcttccatagggtacaaagatagtgaaagccgggagaaaacgggaacttgttcgcagttttctctcggcgcatcccatctaaagctatgtcaaagacagggaaaggcgagagcaatcgtgcgggattgcacgcaaagattgccgaatcgcatcctatcttatgcaacgctacgaataagccgggtacaaaagcaaatttatctgccttttgcccaagcgaataaggacaaaaattaagaatgagccgagagtaaaagagtaaagacgaatttattcgcactttgccggggaaaaaggggcacggcaggacaagggcaacaaacaaccccggaatccattctgcggcaggaaaaaccgacacgacaacgaatcggcgcggcaactcctgcccaaaaagtcggcataagattatttatgtccgaggagcgcaaaaaggttgcggcaagcgctttttttcctacctttgtccggtaattttcgtatcggggcgaatcgcgcccggcaaaacgcgacttcgttttacaagcagcccgcacgcctcccggcacgaagcaaaccggacaaacggcaggtaatcccgtttgccgcaaagttctgaaaatatatgttaagtagaagacagcttagaatcaaggcgataaaggccctatatgcgcatctcaaatccgactcggacaatatgatcgcgtcggaaaagaacatgatgaattcgatcgacaagacctatgacctttatttccagatgatgacccttccggtcgaactggcgcattatgcccagcaacgtcaggagctggccaaacagaaaaagctgccgacctacgaagacctccaccccaacacccgcttcatcgacaacgccgtgatccgtatgatcgccgacagcgacacggtgaatgaccgaatggcagcccgcaaactcggctggagcaaatatcccgaactcatccgcacactttacaaccaactcgcggcgacggactatttccaggcttacatgagcgcttcggaaagttcgttcaaagccgacgcagcgcttctggccaccttcttcgaaaaggagttgcaggattgtcccatgctggacgacgtactggaagagcagtcgatcctctggagcgacgacctgggattcgttctgacgctcgtgatccgcacgatctccaacatgcgccagtcccacgcggacgtgaagatgctgcccgaattcaaaagcgacgaggacgccgaattcgtcaaaacgctgttcgaaaagacgctcatcaactacaacgagcggctggaatacatcgaaaaatttacgcgcaactgggacgtggagcgtatcgtcttcatggataacctgattatggccacggcgatcaccgagctggtttcctttccttcgattccggtgaaagtaaccctcgacgaatacatcgacatcgccaagttctactctacgcccggcagcagcacctttatcaacggcgtattggataagatcgtggaagcgctgaccgaagagggaaaactcaaaaaaaccggacggggactgatatgatgcggcacattttctgcatattgctggtagccctcgtcatcggctgtcagtcccgccggacgagcagtgtccagagcgggccgacactcgaaatatcggatgaaacgctcaccgaaggtacttcggacacgatccgtttcggacggctccactccggcgaaacaggcatcaaacggtttcggctgcaaaatacttcgtcccggacatgggtagtgacccgctacgaggtttcgtgcgaatgtgtcaccccggaattcgaccgacggcccctgaagccgggcgaggaaatcccgttcagcgtccggttcgactcgcggggcgagcacggctggcagatgaaactgttgaaactctatgcgtcgggatcggaggagccgttacggatttacatcgaagccgttgtcgattaagaaattgttaattcgcaggaaaggagcgccgaacggctgcgactcctgcaaattttaactatatttaccggaaaatccgacggaggcaaccgaaatacggatcccccgatatattcgaaggaatccccggtacgtgcgagtttcgatcgggaagaaccggttcgggcagaacctgccgccagcgttcgaataatttggtgcgacacccggctttgactatctttgcagaagataggatacgcctcggaaaactgcgagcaagctcccgttttcttctcggctttcactatctttgcaggaacaggaggcagttcggcaatctttgcaaaagacaggctaccggtccgaaaagatgagagcaaccgatgatcgaaacagccgaggatcagatggaagcgtcctgtccggaagaaaaaacgagaattaagttcggcacgtcgcctgtcccggctcgtcccgatccaaagaaaagactaaacattaatattaatagaaaactatgattaacttacttcaagcgacagcacctgcaccgcaggctggcggcggctattcgctcttcatcatgctcggcctgatgattctggttctgtatttcttcatgtggcgccccgaatcgaagcgacgcaagcagatggctcaattccgggccggccttaagaaaggcgacaagatcatcacggccggcggtatttacggcgtagtgaaagagatcaaggagacgaccctcctgatcgaagtggacggcaacgtcacgctccgcatcgacaaaaacatggtcgtcgccgacacgagcgacctgcagcagcaacagcagaaataaaaaagtactgagacaagagaactccccttcccgatcacgggaaggggagttttacatacgattatccggtcgtcgcccgaaataaatagcaaaaccaaaccggccggccagaatcaaaaaaccgaatataagaggctcaagagaagagggacggattcgaatacgcaaaagccatggattcccggtacgcacggaaacacacacgccgacacatcggacgctgaaaatatccatttattcgtatatttgcgtacgaaattctttcgaaatggcaaagaaattcacttataagacacaaggtacctgttcgaaatccatcgaaatcgaattggagggagatatcgtcaaaagcgtccgcttcgaaggcgggtgtcacgggaatacccagggaatcggtctgctgacgcgcgggatgcaggctgccgacgtgatcgcacgtctcgaaggcatcgactgcaaaggccggggaacatcctgtcccgaccagctggcaaaggcgttggcgtcaggccctcggacaataacggctacgacgaaacccgagaacggtccggttctccaaaatccggggaaacaaaggaaaaacaaaagcagctataccgtcagtcgcaccgctcccggaaatggcgctgccgatgtctgtcggtcgcccggcccgattgtggtaacgggcgattaaatgaaaaggaaagtgctgcccaccccggcagaggcaaaagcagaaaccttttcggaaaaatacgatgatccgacggcacgcccaacaacgtctttcgaaagcggcaacccgatgagaaaaggatgcgccaacaaaaacaaagatgattatatactttattatcaagcgtttgaaacatcggatccgacgcgcctattcgccgcttgcgccatgcacgaaaacaaaaaggccggattttgaaatccggcctttcccgtcgcagcgacttcggctacgaacgacagtgttgaactacctggactcgaaccaggaacgacagaaccaaaatctgctgtgttaccattacaccatagttcaatccgatgctcgaaagcaggtgcaaaggtacggcaaagaatcgaaatttcaaaaaaaatcctccgcgaatggtaagcctgcgaaaaatttccacgaaaaaagtgaaaaataaaggcccgaatcaccggacaccctcactacggcacagggattgcggcgtttcgattccattgataaaatcgataattcaatgcagtaagatatgattataaccatgattctgatttttgtgttcgggtacctctgcatcgcgctcgaacacaaactacgcatcgacaaggccgcgatcgccctgctgatgtgcggtgcgctatggacggtattgagtctgctgggcaacgacgcccagatcggcacgcaactgatcgagcaactcggcgatacgagcgaaatactcttcttcctgatcggcgccatgaccatcgtcgaactgatcgaccggcacggaggattccacgtcatcaccgaccacatcaaaacccgcaacaaacgcaaactgctctggttgctatcgatcatcaccttctttatgtccgccgtgctggacaacatgaccacgacgatcattatgatcatgctgctgcggcgtatgatcagcggacagaaagaacgatggatcttcgccagcgttatcgtcatcgcggccaacagcagcggtgccttttcgcccatcggcgacgtaacgaccatcatgctctggatgcggggcaacgtcacctcgggcctgcttgtggccaaactgttcctccccgccctggtatcggtaatcattcccacggccatcgcctgccgttatattcccgacgaaaacgcgcatcccgaaaaattagacacggcgcccaagctgccgccgttcgtcggcccgcgcttcagccacttcgttctcgtcctcggtgtcggcgggctgctgttcgtgcccatattcaaggctgtaacgggactgccgccctacttgggcatgctgatatcgttgggtgtgctgtgggtcttcacggagctcgtctatgaccacaaacagaacatggaggaatcgatcaaaaaccgggtgtcgaaagtactcaaacatatcgatatgcccacgatcctcttcttcctgggtattctgatgtcggtcgcagcattgcagagcgccggtctgctgaccgacttcgccgacttcctggacaaaaacgtacacgaagtctatacgatcgccggaatcaccggtctgctgtcggccgtaatcgataacgtgccgctggtggctgcctgtatgggtatgtaccccgtcgccgatacggcagccctggcctcgagcctcgacccggcttatatgcaggcgttcgtacaggacggtatcttctggcacctgctgactttctgcgccggcgtgggcggcagcctgctgattatcggatcggccgcaggagtagtggcgatgggactggaaaagatcgaattcggctggtacctgcgtaaaatcacgctgctggcattggccgggtatttcgcgggcatgctggttattttcctcgaacatttgctgctgggctaaagagcataacaacaaaaaaagggctgtctaacaagtttcagacagcccttttttatttgtactgcttattcgagagcttttccgaatacgcgattctaaaaggattaaaaaacttgttggacagccttttttactttttccttccgttgcttccgggacaagattccgcatcagcgaactttggacatgaacttctcacgatcgacgacatagcggacgtggaccccctcgccgatcatcccttcggcatcgcgggccccgacattgaaggtgagcttgcgcccttcgacttcggtcagcacggcggatgcgacgatttcggcaccgacgcccgaaggcttgatatgggtcacgttcatctcggcgccgacggtcgtcgaaccttccggcaaatggtcggccacagccttcatcgccgcattttccatcagggccaccatagccggcgtagcgaatacctgcaagtcgcccgatcccatcgttgcagccacgttgccgccatcgaccgttaccttactttgtgcagaaagtcctttttccatcataatacaaccgttttttattgcgttaataattcagaatcattatctttgaacatagctttagataggaggcgcctcggaaaaccgggaacaagtcccgttttcgctcggctttcactatctttggcagaagataggattcggttcggcaattttcgagaacaagttctcacaattgccctcacatttcactatctttgaattgcgaagaggattcgaaatccgtccgcttcggacagaagcgccctctccgcccttgtgtttcatcctgacaaaggtacgaaaattccggttccgatgaaaaagtggtttttcctatccctggtattgctgctctccctgcccgggcaggcttcggcccgacacggacagccgggccgatggcacacctctttcgaaatcggacccgacggcgacacgatctcggtcgtccccataaaacccgtcttcgtattcagcaaaaaagctgacctgcgccgttaccgcaaactggtcgaagcggtgaagaaagtctatcccgtagcccaagccgccaaagcacaaatggttcaaatggaggcggaactgctccggctcgaaacgaaaaaggaacagaaacaatacatcaaaggcatcgccgcagcgatcaaaaaggagtacacgcccgtgctgaaacacatgacccgtacccagggccgcgtgcttctgaagctgattgaccgggaaacgaaatacacggcttacgaaatcctccgggagttccggggcggcttcgtcgcgggattctggcaaagcgtatcgcgtatcttcggacagaatctcaagtcggaatacgaccgagaaggggacgacaaggtactcgaacagatcgttctctattacgaagcggggctgctgtaaaccgcatccgcccgccgttcacagacaatcgcccctgttttccgtccgtctgcaacctccgcagccaccgacggcacgatcgaatgccatccaccctcccattcgacagacgaaaatacccatacgggcacgatctccggaccactccgtcaaaatacaaatatatttgtatttctgttcggcattttcataatctttggcttcgcctcaaacgcttcgatccgacaaagtgcagataaacttgcttccgcacccggcttttttctaatctttaacgtcgttcaagcattccgcctcagcaaaatacaaataaaatttgcttttgcacgcagtttattcgtatctttgacttcgtcttagatactccgcctcggcaaaatgcaaataaaatttgcttttgcgctcggcttattcgtatctttgcaacgatcggacaaaattgcccgacttacttaaccaattatcgttcaaattctttatcgtatgaaaaaactgttcattttctcggctctcatcaccctggcgctgggggggggagttgcagcgacagcgaaacagatgagtttcagaacattctgattcctcaggataacttatcggcctcgatttcggccgatgtgttgtcccataccatcggtttcgaaacgacccagagctggacggcatccgtgcgtgaaacctcgcgtgccgaaagctggatctccatcaaccccacttcgggcgacgccggcaagcacacgattaccgtcacgctcactgaaaacgaaacgaccgaatcccgccaggcggtcgtcatcatctcctgcggcggagaatccgcgaatatctccatcacccagcggggcgtgggacaagacgaaccggaagatccggacaacccgaataaccccgacaatcctcaaaagcccgaacatcccgacgtagcacccgaagaccggctgacctgggtagaaacgacctacaccgaggtttacagcgacggttccagcaccgacaagagttacatgctcttcgaatacgatgccgaaggtcttctgaccggttacgaccaatacgattacgattcggaacagaccgacaaaatcaatgcctcctatgaaaggacgctcaaacgaagcgaagggaaaatcacagacgaagagaaatggttcgaaatcgacggcagcagttacgaaggaatgccccttcccaactcgggcgaatacaccaaggaataccgcttgaatacaagcggtttggtaagtagctacaccgacccggacggcgccagccagactttcacctacaacgccgacggcacgctggctcgcttggaataccgcaacccttcctatcccgatgagaactcgacctcgacgcttacctggcaggacggaaacatcgtttccatttcgaccatcgacggacgggataacgaaacaacgacgttctcctacaccgaacacctcaacccctggaacggcatcgacataggcgccttcatgatcggcgatgcagaggagtccgccatgctgctcggcatcagcggtacgaccgttaagaacctgcccgccagctgtcaagacggcaacagcactacgacctacacctacacgttcgacgccgaaggccgcgtcagcacgatcgtgaccgaagtgaattggcaggacggcggcggcagcggcagcgagcgcacggaatatacgctccactacggtccccaaaccgtttcgaaacccgattacatcccctacctgaccaaacaggaagtcgtggacgaaggaacgcttccctatacattctcggaagacaatccggacgaaaaatggtacggtgtaaacgcctacacctcctatgccaagatccgcagcacgatgtccgacggcagaaccagcgaaaaaaccgaatatcggcagatcaacatcaatccctcgactcaggaaggtcctgtattaggctacctttacatcacgcaggacgaagcggacaacttccgactcgtttcgacctctttcaacgagattccgctgggtgaaaacgagataaccccccaccgtttcgtctatacgctggaatataactgcttcacggtcaatctggaattcgacgtgttctatccttcctgcacagtcttcgatcctgcgaccggtgaacagaaaacccactggatgccgatgcttccgctcgacaagaactgtttcacggtatccgaaccggaactgcggtatatgggtgaaaatacggacgaaaacggccctatgagcgaatactactaccgacaggagtatcttttccaggtcaatcgggatgtggagcctacggaatacgactaccagttgttgagccgtcatatgtacgtcgcacactattaaaccgaaaacacggggcacagccccatcagacaacccctccgagaactcggaggggttgtgtctttgtcgccgacaccgaggaaaatcagcacctccgttgcgattctgcgaatagttttatatatttgcaagcgaaaaatccggagcggacctgcaacggccgaacagggagaacgatttgcccgacaccgctttagctttgtccggactgaaaaaaccgactgcaacgacggctccgcaaaacgaaaaatgctccagcgtcgggcggcaccgtttcccggcatacgataacgaaccgaaactatgtttgaaaacttaaccgataaactcgaacggtccttcaagctgatcaagggcgaaggccgcatcaccgaaatcaacgtcgccgaaaccctcaaggagatccgccgggcactgatcgacgccgacgtcaactacaaggtagccaaatccttcaccgacgaggtgaagcagaaggccctgggacaagacgtgctcaagtccgtcaagccgggacagatgattaccaagatcgtgcgcgacgagttggcacaactcatgggcggcacggcgaccgacatcaagctggagggcacgcctgcggtcatcctgatcgccggtctgcaaggctccggtaagaccaccttctcgggcaagctggcggcgatgctcaagagcaagaaggggcgccaggtgctgctcgtggcgggcgacgtctatcgtcctgcggccatcgaccagctcaaggtgctgggcggacagatcggagtcgaagtctatactgaagaggggaataaaaatccggtgcagatcgccgaaaatgccatcaaatacgcccgtcagcacggtttcaacgtcgtgatcgtcgatacggcgggccgtctggccgtcgatgaggcgatgatgcaggagatcacggcgatcaaacaggccgtgaaaccgggcgaaacgctcttcgtggtcgattcgatgacgggtcaggatgccgtgaatacggcccgagagttcaatcagcggctggatttcgacggcgtagtgcttaccaaactcgacggcgatacacgcggcggtgcggcgatctcgatccgtgcggtggtgaacaaaccgctgaagttcatctccagcggcgagaagatggatgccatccaggtattccatccggaacgtatggccgaccgtattctgggcatgggcgacgtggtatcgctcgtggaacgcgcccaggagcagtatgacgaagaggaggcccgccgcctgaagaagaagatcgtcaagaatcagttcaacttcaacgatttcatggggcagatcgcccagatcaagaagatgggcaacctcaaggatctggcttcgatgatccccggtatgggcaaggctctcaagaatgtcgagatctcggacgacgtattcaagcagaccgaggcgatcatcaactcaatgactcccctcgaacgcgagaaacccgaaatcatcgacgccaagcgccgcgaaaggctcgccaaaggcagcggtacgacgatggccgaggtgaacaaactgatgaagcagttcgaagacacgcgcaagatgatgaaggccgtcgccggaggcaatatgaaaatacccaaattacccggacgcggcttccgcagataagcggaatgaatacttcgccaactactttataccccttcggttcgggctccgaaccaaaggggttttccttatgacatctatcatataatcgacccgcttccgggcaaatccggcatcctctgcaaccacgcaccggcagcggaaaggcgattcacacatactctccgaaatcggtgtcagctcataattgggcaagcagaatgcaggacaaatccgaaaaggcttcgcccgtaaacacgaagaacggattcgtccggaacaccttgcagacgagtacaagaaaaatatacagaaataggaaaaaaccggagaggaaaacacaacgcgaaggaccgaagaaaacgcgttttttccggcccgatcttccaatccgtccgataacgggctttttccggaaaaacagcggtgtcgaaaagagccgcaacctccctcggccccccttatccgaaaaacgccaccgaccgacaccttctgaacatagaaagatgacgcttcatttggcagggggtatttttttcgctatctttgtaaaagataggaggcggttcggcaatcttagcgtgcaaatccgtgcgattgctctcggctttcactatttttggagcaggcagcatggcggcccggcatgaaaaacaagttcgttcgttttatgcggtcctcgctttcactgccttttcgtgagaatcagacaacagacatcctatgcacaaggccggtttcgtcaatatcatcggaaatcccaacgtcggcaaatcgacgttgatgaacgcactcgtaggcgaacgcctctcgatcatcacctccaaagcccagaccacgcgccaccgcattctgggagtggtcagcggcgaagatttccagatcgtcttctcggatacgccgggcatcctgaaacccagctacaaactccaggaatcgatgatgaaattcgtcaccggcgccgtgaacgatgcggacgtaatcctctacgtcaccgacacggtggaacagagcgaccgttcgaacgacatcctcgaaaagatccgccaaagcgatattcccaccctcgcggtaatcaacaagatcgacctcacgacgcccgaaaagctcgaagagctcgtcgataaatggcaggcgctgctgccggccgccacgatcgtcccggtatcggcacgcgagaatttcaacatcaagggacttttcgacctgattctggaacggctgcccgagggagaagccttctactccaaagatacgctcacggacaaaacgctgcgattcttcgcctcggaaataatccgcgaaaagatcctgcgcaactacgacaaggagatcccctactgttgcgaaatcgcgatcgaagcctacaaggaggaaccgacgatcgaccgcatttcggcggtcatctatgtcgcacgcgactcccagaagggtatcctgatcgggcacaagggcgagaaactcaaaaaagtcggacagcaggcccgcgaggacatggagcaattcctcggcaagaaggtcttcctgcagttgtacgtcaaagtaaacgagaactggcgcgataacgaacggcaactcaagcgcttcgggtacgaacaagaataatcacaaccaaatcggggtgtcgtggcattgcgcaaatttatcctgaaaatcatcctattggggacgctgctgagcaacgccgccactgccgacgcccaatacaacaaagactatttctactgggccagccgccgttgcctgatgaaccgcgaatatcaggaggcgattcgtgtgctcaacatcctgttgcgggccgatccggacgccgcagagggctatttcctgcggggcgtagccaaattcaacctcgacgacctgctgggtgccgataccgacttttcggctgccatcgtcaaaaaccccgtattcacgaccgcctacatctaccgggcgctgacccgtacgcgcatgggcaactacgacgacgcgctgcaggatttccgcgaggcgatcgacctgaggcccgacctgccggacgcctattacagccggggctatacgcgcctgcagaacaagcaatacgaggaggcgatcgaggatttcgacaaattcatcttccaggaaaacaaggtagccgacgcctacatcggccgcggcacagcctacctgtacctgaaggacaccgtacgggccctggaaaatttcgaccaggcgatccgcaccaaccgcgaaaatcccaacggctattaccaacgcggaaccttgttgctgcaaaaagaggagtatgcccgagccgaagccgatttcgacatgtcgatccgctgcgactcggctttcctgccgccctatttcaaccgggcggtggtctattccaacaccaaccgtccgatgcaggccctcgcggatttcgaccgggtactccaactggactcgaccaactcgttcacctatttcaaccgggcgattctccgcacccagatcggcgattacaaccgcgcactcgacgacttcgaccgcgtggcgctctactcccccggcaatgtccaggtctattacctgcgtgccatgctcaaaacccgcttgggcgatctcgaaggcgccgagcgcgactacacccgggccatcgaactctaccccgacttcgccaacgcctacctgaaccgcagcgccctgcgttatgcgttgcataaccccaaggctgcgaaacgggacgaagagatcgcccaacgcaagatcgccgaatacaaatcccacctgaaggacagcacctactcgatctatgccgatacgacgcaacggatggacaaactgctggccttcgacaaccaattcaccaacaactacttcgaccgcatttcggaacaaccgagcctgggccgcagcaacatgcgtctgctacccctgttccgcttcaccctgatgcagcccgacaccacccggatcgaggcgtcgaaccgctataccctgcaacgggtcaaagacttcgagaaaaaactggacaatccctacctcgtcctctccaaccggcctacgaacatcggtgcggactctttggcgatgctcgacagccgctataccgaaatcctgagccagaatccgcgcgactggctcctgcaagtacaatatgccatttcgcaatcgctgatccgacaattcaccaattcggtcggcacctattcgtcggctatcgcagacaatgccgccaatccgttcctctacttcaaccgggccgtgacacgggccgaaatgatcgacttcatttcgggcctggacaatccctatcagcgaatttcgatcgactccgacccggcgaacaaactcaccaacccccatacacgcacctacaattacgacgaagccatcgccgatctggacaagacgctccgcctcttcccgaacttcgccgaagcctactacaaccggggaacgctgctggctctttcaggcaaactccccgaggccttcgaagatttttcgagagccatcgaactgaatcccctcttcgccgaagcgttctacaaccggggcatgacccaaatctatatgaaagacacgcgcaagggctgcctcgacctctcgaaagccggagagctgggcattacctcggcctacgaaatcctcaaacgttacacgagggagcatacagaagctttttaactaacaataaccaattcaataaactatgacacaagctattcaaaagaaactgaacgactcggcgtgggctcggtggaccgcgctgattctggtggcgctcaccatgttcttcggctacatgttcgtcgatgtcctctcgccgttgcagaacatgctcgaaagcacccgaggctggagccccacgattttcggactgtacggcggttcggaattcattctgaacgtctgcggtttcctgctcgtcgcaggtatcatcctcgacaagatgggcgtacggtttacgggtattctttcggcctcgctgatggtactcggtgccggtatcaaattctacgggctgagcaactacttctatgaaggcggattcggttacgagttcctcaattcgttcctcacggacattccggccagcgcgaagctcgcctgcctgggcttcatgatcttcggctgcggtacggagatggccggtgtgacagtatcccgtgcaatcgtcaagtggttcacggggaaagaactggctctggcgatgggcctggaaatggctattgcccgactgggcgtattcgccgtattcagcctgtcgccctgggtggctaactggggcggcgatccgagcgtagcacgtccggtagccgttgtcggcctgttgctctgcatcggcctgctgacctacatcgctttctcggtcatggacttcaaactcgacagacaaaccgaggcagacaccccgataggagaaaccgaagagcccttcaaggtcgccgatctgaagaaccttttcagcagcaaaaccttcctgatcgtttcggcactctgcgtgctctactattcggcgattttcccgttccagcgtttcgcaacgggtatgctcgaaagtaatctgggcatcaccaaccagcaggcttcggacatcttccgctggttcccgatgggtgcaatgattctgactccgctcctcggctggttcctcgaccacaagggcaaaggcgcgacgatgctgatgatcggtgcgatcctgatgttcatctgccacatgactttcgcactggttcccctcacccccgctatcgcgttctcggcgatcatcctgctcggcctctctttctcgctggttcccgccgccctgtggccttcggtacccaagttggtcgataaccgctatatgggttctgcctatgcaacgattttctggatccagaacctcggactgatggccttcccgatgatcatcggctgggttctcaacaaggtcaatcccggcgtgggagaagcgatcaaagccggtgaacacgtaagctacaactacacggttccgatgctgattttcgccagcctcggcgtattggctttcctgctggctttctggctcaagctcgaagaccgtaaaaagcactacggcctggaactgcccaacatcaagaaataacgataatccgtatccccggtctgccggaaaaatgatgagtaaacccccgctgcaaattgcagcgggggttttgtaataaagagtctatcggctaaagcgacgaggatcgtacgagattccgcttttcgagatacaagagttcctatttaatcggatcgaccctctacgcttcctatttaaccaatcggtaaagttccgtaatgcgatcgcacatcgcatcccacgaaaagcgcttcttctcctcttccatgttcgcacggaatcccgcgagcacatcgtcccgccagatacggtcgatggcccgggcgacttctgcggcatcgggacggcagacgaagccgacacgaccgtccggcacgatctccggaagaccgcccacgtcggtcaccaccatcggcaggtcgaattgataagcgatctgggtcacgccgctctgcgtggccgaacgatacggctgcaccaaaaaatctgcgacggaaaaatagtaacgcaccaattcgtccggaataaaatagtcgtgcagaatcacatcgtcctccagtccgttgtcggcgatttgcttcaaatacttctctttcggagcatagaactcaccggccacgatcaggcgccggtcttcggcaggatgctcccgcttgtagatcttccaggcatcgagcaacaggtccaatcccttgtagtcccgaatcagaccgaaaaagagcgcatagcgtttcgaaggatccagttcgaggcggatgcaggcctccgtacggtcgatgacgataccgaaattttcgaaaagcggatgcggagagaagagcgccggaacctgcgtatatcggcgcaattcgcggtgcacctgctcggacatatagataaagccgtccaccgccctcaggaaatagcggttgaacggcttgtcggtcatatggcgttcatgcggttcgacgttgtcgatctgacaaaggatacgcgtcgtaccgttctttttggcaaagcgggcgatcgtaccgaaacagggcgccataaagggggtccagtatttcatcagcacgaaatccggcttctcgcgggcgatccaccgccccacggcgatccagttgaacggattcatcgtattcacgcaccgcacgatgtacagatcgggcggcggaggtgtctgcaccgtctgattcctgccgggaaagaaaatacggggatactggagcgtgaaagtcttgatcttcacctcgtcgccccgatgttggaaaacccgggccatgctctgcataattacggccaagcccccacgatacggatgggcgggccccacgatcgaaattttcataccccgaacttttatttataactgaaatcgaatccccgaacggattcaaaccttcggtacggccctcctgttttcgaataaacagcgcacggcaacttcaggaaaaatacaaataccctaccgaatcctgcaacaaggagataacgataaccggttcgggaggaactgcccgaaccggttatcactatccatcctatttcgttttattatacgcctccacaccgctcttcaggaagtcgatgtatgcctccacgtcgagattgtaagcccgcttgggaaccaattcctgcccatcacggccgaggatcaggtagttgggctgtccgttcaccccgaaacgggtctgggcgatgtaggagttgatgcggccgatgtccttgagaaccttgcctcccgcagtggtcacccattcgttctcgggcactttggtcttgtcgtcggtatagagggctaccagcacgtaatcgtcgcgcaggatctgctgcacgcgcggatcgctccagacgcgggcttccatttcgcggcaattcacacaactgattcccgtaatgtccacaaacaagggtttatcggcctccctggcagcggcttcggcctgggccagatcgaaataccccggcagatcgtaaggccagtgcaggatatccgcatatttgatcttttcagtcgtctgtgccgttgctgacggtgcggcaacgacaccctgcgtattgatcacgaagtcctgcgtatgcatcgggggcaaatagccagaaagagctttcagcggcgcaccgaacatacccggaaacatatagaccgcgaacgaaagcgaagcgatggccagcgtcagccgcgtcaccgaaacgtgcttgagttcgtcgtcgtgagcgaagcggatcttacccagcaaatagaaacccagcaatgtgaacacgacgatccagatcgccaaatagacctcacggtcgagcaacccccagtggtaggtctggtcggccatactcaggaacttgaaaccgagggcgacctcgataaaaccgagaacgaccttcacggaaccgagccaaccgccgctcttgggcaggtctttcagcaaggaggggaagaaagcgaaaatcgtaaaaggcagagcaaaagccagcgagaaagcgaacatcgtcacgatgggcacccagaattcgccggcagtcgaacgaatcaggacgttgccgacgatcggcccggtgcaggagaacgacaccaacaccagcgtcagagccatgaagaagataccgatcaaaccgcctttgtccgcgtgccggtcgctcttattgaccatccagctcggaagcgtgatctcgaaggccccgaagaacgatgcggcgaaaatcatgaacacgatgaagaagatcaggttgggaagccagtgcgtagccagccagttgaagatgtcggccgtcacggcatcgccgcccaccagacgcgtaatcagaatgatcgccgcaatgggaagcgtatagagcgctacgatgaagaaaccgtacatcgaagccttgaaacgtcccgcagcaggcgatccgctgcctttcataaagaacgatacagtcatcgggaccatcgggaatacacaaggagtgagcagcgccgcgaagccccaaagaaccgcttcgataatcaacccccacagggttttggactctccggctccgtcgccggaaacaggttgatccgcagcgtccccggccgcaacggatgcccaggccgcctcgggatcgccgatcgtgatctcgaatccccaatcctcgggcgaattgcaattttcctcctcgcaggaacgccagttgatattgcctttcaatacggcgccttcacccgtcagggtgactttctgaccgaggatgatttcatcgaaataagtacccatttcgacctcgaaaatatcgtcgtattcgcgtttggaagcgttgatctcataaggatcgccgtcgagcgtcaggcccgttgcaggctcgaactccaccagggtcgaagaaacgtccgaatgcaggtcgtacgtatgccatcccggcaggatcttacccgtaaatacgacttcgtaattcgaatcgccgaggtccttcacagtgctgtcccaggtaatggtcggggactgcgcgtgagccgacaacaaactcgtcaagaaagccgccagcagcacgatacggatataaaatttcatatctctattattttaataagttaatagtttttttcgcgtgtaaagatatgaaattttattcaaaaaccacgtatgggacgcattatctcgcgtccgcgaggaaaaactactcggaaaccttcccttcggcttcggccttgctgcgtgcaaaagattgcaaggcgaggtactccttgtcgccgtaatcgagcaggttctgcaactcgttgcggaaatagtccaagtgctcctcctcttcgacggccagatcctggaacatcttgtgcgttaccgaatcgtcggcttcggccgcaatgcgagcggcatcgttatagctatcgatcgtactctgttccagttgcatagcgaaacggaacatctccttgggatcggtgatctggcgcgtcggaaacgacgggttcatattcacgtccccctgcaagaagaggatacggtcggacaactcctcgctgtgacgcatctcggcaatcgaaatcatccgcatctttttggacagatactcgtaaccggcatcttcgaaatggacatggaaatacatgtactggagcgaggtggcaatttcttttcccaaagcatcgttcaacagatcgatacttttctggtacttgttcgcaactttgatcttttccataataataaaggttttgtccctatatcagcaaaacccgttccagaaaggaacaaagccgatcgtaaaatcggaccgaaacgaagtcgattcgggtcggctccctgccttgcccgccaccacgaaatacagcacctcaacgccactcgagcgccgcccggacagcggcttcctctccgttcgaaacctcgaacagcgacaagccgtcccgttgttcgtacccgaccgtaagggtttgcccgtaacggcattcgtgcatgaaatgaatatcaagacgcaccggccggatcgcggtcaactgttcgatgggcagcatatcgaacatcatgttgatataacgcatcgtattgacgtgacggttgaagtcgatgtcgctgtaaaccacccggtgctccatcacatgctgcggtgtgatccccatcaccttgcggggtttctccgtcggcgaaggggcatcgacgagcgtatcggtacaaggcccgataaccgtgttcaggtcgatcgctttacggaccgccaagtcgatgatgcaccactgcgtcacggcccgcccgaactcccggccagcggcatcgtgcagcgtgaaattacgggtcgagagcatccggttgtactcgttcacccacgttacgatttcataagaagtgtattgttcggggcggtcgtcgatctcgatcgccatgcgcgaaaggacccacgagcggttttccttattcaacttatcgatcccgaaccctttgcgctgggcatcgacacccgccgtattgaggacctcgttcgccaaagccggaacggtcatccgaagtgtgaaatcgacctgctgagggtctgcataataagtgtaacctgttttctctgccatatttcagtgcgtttttcaatttcaaatgcaacgaaacgacaatccgccggttatccgccgggccgggagaaagccgtagataccgaatggtttcattcctacaaaaacgccccggcccggcttcctgcggacagtagcggcgtatgccggaaacagagcgaagccttccggccgcgccgactgcatttcgtgcaaagatacgaataagccgggtgcaaaagcaaattttatttgcgttttgccggcatggagtgtctaagaagaagtcaaagataataacaagaagagcggagaaccaaactcaacttttgttttcggctcccccgcgtaacgaagctcgtagaggggctttctcgtttcgatcgtccgtacttgcaggggcctcgcctccaagacggggatgatccctgccggtccgaccttcggtaggtttcagccgggttgcccgtccgatctccggttcgggaaaagtccggaaaattccgctccgtattcagacgagaaacatcattcgttatattttattgcgtttttatcgaaaaacgataaaaattatttgttttgcagaagttctttactatctttgcctcaccggaggttaaaaacaggtcgaacacctccattacgtattcagcaaaccgaaaatggacaaaaaacagaaaaaatctctgcggcgccatctgctggtcatttacatcttttatttcctggctctggccgcaggattcatccacagcttcgtgccccacgtgtcgtcgagtctggcgacaggttggcaggctgcgtccgaagacattcggatgcaggaaaaacacggtatcgcgcaacacacctactttttggcggcccggttgcaaaacgcccagagcgacgaaactcttttcccgatagaaaccggacacgcatcgatctccaccgaagccgaatatacgggggttaatatctacgtcaaaacggacggaaacagtgacccgacagtagtccggacactgaacagaatcaattacatactgctgctgtccatcccggccctgctggccaagctctctatcctgatcctggtagcgctgattatcaatatcctgcgcaaatcggtacgggacgaacaacccctgccggggcgtatcatcatctacacgcgtgccgtagggttcctgctgattctggccgaagtctgcaccggagtcggctcttatatttaccagagtacgacccggacgtttctcgaagattcgcccctgcaagtcgccgcctcgttcccgctcaactactggaacatcgtcatggcgattctggtactcttctcggccgaggtcttctcgatcggatcccggttgagcgaagagcaaaaactcacgatctaaagaaaaaataaatgtcgatatacaatatacacacgggggggggacgcaagacatggcgataatcatcaacatagatgtcatgatggcgaaacgaaagatgtcactcggcgagctcgccgagcgggtcgatatcaccccggccaacctttccattctcaagaacggcaaggccaaggcgatccgcttttcaacgctggaagccatttgccgcgaactgaactgccagccgggcgacatcatcgaataccgaccggaagaaacaaccgaatgacaacgcaatacaaataatttcacccaaaatcaattaacaatcattttatgaaaaggttcattcttttacttgtcacgctgttcgcaatgacgaatgtcatggcgcaactacagcctgacatgccgattcccgccgataaggaggtgcgcgtcggacgactcgaaaacggcatgacgtactacatccgtcacaacgaaaaacccaagggacaggcatctttctacattttccaccacgtaggagctgtccaggaggaagattcccaacagggcctcgcccacttcctcgaacacatggccttcaacggcaccaagaacctgccgggcaaaaagatgatagaatatctggagcgtaacggcgtcaaattcggtgcggacctgaatgcctacacctcttacgatgaaacatgctacaacctggacaatgtgcccacagcaaaccctgcgacgatcgacaccgcactgctgatcctgcacgactggtcgcagttcatcagtctggagcctcaggagatcaacaacgaacgcggcgtaatcatggaggagctgcgcacccgcgacggagctggatggcgcgccatggtacgacgcaacgccgccgtcaacagaggctcgaaatacgagcaccgcaacgtaatcggctatctggacggtctgaagagtttcgaccataaagccttgtacgacttctacaaaacgtggtatcgcccggaataccaggcgatcgtcatagtcggcgatatcgacgtcgatcggatcgaaaacaagatcaaaaccctgatggcggatattccggtttcccctgcagatgccccgcagaaagaggcttacctagttcctgaaaacgaagaacccatcgtcagcatcttttccgatcccgaaatgacggcttcggtcatgcagctcttcatcaaacgacccgctctccccaagcaatacaacaacctgataattagccaaatgtacgatgtactcaactcctacacaagtgccatggcgaacgaccgtatgaatgaaatcgccatgcagcccgatgctccgttcctgagtgccgggatggattcaggcaacatactgggagtgaatccgacccaagatctcacgatggtcgccgtacaaactcgagacggagagttgctctgcggttacaaagctatcctcgaagagatggaaaagatgaagcgttacggctttacacagagcgaattcgatcgtacgaaagctgaattcctgcgtcaggccgaggctacctatgccaatcggaacgaccttacgaacggacaatatgttcaaacctacctggcgaattacaagaaaaataccgctatggcagatgccgaaacgcagtacaacctcgacaaacaatacctcgaagcattgaccctcgacgatgtgaatgcttgggtaaaacaacttctgacacctgaaaaccaggttatcaccgtcgaagtaccgaagaaagagggactgaccgagccgaccgaagccgaacttctggccatccgcagcgaggtcatggcatccgacgtcgaggcttaccaggacaataccgtcagcgagcctctgatccccgcagatatcaagctgaaaggctcgcccgtgaaaaagaccgcatacaacgaggatctcggaacgaccgaatggattctcaagaacggtgtgaagatcatcgtcaaaccgacccaactcaaggcggacgaagtcctgctgcaggtacaggctgacggcgggatgtcgcagcttgccgatactgaggtgaaggagggtgaattccttccggtcatcgcggcccagtcgggggtgggcaaattctctgcaatcgaactgaacaagcagctcgcaggcaagaaagccggaatcaacctgtacgtcaataactacagcaacggtatgagcggttactgctcgcccaaagacatcgaaacgatgctccaactgctctaccagaacttcacaagtccccgcttctcggaggaggatttcaacacgacgatggacagctacaaggcatacgtccagaacctgacctcgaatcccgactacatcatgcagatagaaacgatcaaaacgctttacagcgacaatccgcgtcagcagccgctgacgatcgaggccctggaaagcatctcgttcgaaaatctgccgaaaaccttcaaaacgctctacccgggtgcgaacagctttacgttcaccttcgtaggcaacgtggatttggaaacgttgaagccgttggtcgagaaatatatcggttcgattcccacctcgaaacacgtgcttaagttcacggacgacaaactccgcacagccaaaggcaaggtcgtgaacgacttccgcaccccgatgctgcagccgaaagtttcggagttcctgctcttctcgagcgatgcggactacacgctgcgcaacaagcaaaccatgttgctgctcaacatggctctaaacaaccgttacctgaaatccatccgcgaggagaaaggcggcacgtacggagtacaggtaagctatactctctcgtatcgtcccgaaaaacaggccctcctgcaaatacagttcgacaccaacgaggagatggccgacgaactcgtgccgatcgttttcgatgaaatcgagaaaatcgcgactgaaggaccggaagccaaagacatcaacgactcccgcgaatacttggtcaagcaattcaagaatacgctcgaaaataacggcacctggttcgggttgatcgacgactacaaccgtcacaagcagaatctgctcgccgactacgaaaagaccctgaacagcatcacttacgacgagatccgcgacctggcgaagaagctcctcgacagcggcaacgtaatacaggtcaccatgcgtcccgaagctcaacccgaaacagatgaataatcatcaataacaggttttattcactactacccccgaactctcaccggttcgggggttttctttggtttcggactcctgttcacggatgtttccttttccgctcctatctgcaatgcaggaagatcgtccacgcacaggaatcgtatccgtttccggaaaacagacgcggaaccaaactccacgaacgacgttatgtcataccccgccatgctttccgattccgcacttcgcatcgaattctccgtttcggcgacgctcttccgtttgcggacagctctctgccgatcacgttgccccttcccggcagtcggaatcgcattatgcggacagcaggtcccccggtgcgacagcctgccaacttgcagcaaaagaacgatccgaacaatgtcttgcttttttcggacatacggcaaccggctccccggcaggcaggaaaaacagtaacgggacaagatcatgcgctccgacttccgcgcactgctcttccctgaaatttacgcctcataagaccggaggcagctccttcgcggacaatacgagcggaatcgcaaccgcataaagaataaaaaacgggcctcatcaaaaagatgaggcccggcgatttcaactgcaaactgcggctatttcgaagtcacgaccacgtcggacgccttgttcagcaacaactgataggccgccgtcgcatcgctgccctgcgaaaacttggtatagatcgcggtaatgttcaccacggaaccgtccgcaggtattttctcgtcacggaaacggcaataaccgctcgaacgtacgacataattgcctgcgagggtgttgatgtcgccataggtgaaccaggcagagccataatagaacgtactctcgtgcgtaagctcatcgacccgcttcgtcgcccaggtagcccaatcgttgatatcggtccaacccggagaattcacatcgtaggaggtactgttggcgaagtagttggggaatgtatttttatacccccagccggccttgccgaacttgctttccaacccttcgaaacggatcaaacgccccagcgactcatccgtcagcgtcgaataggaagcgggagtaaccaccaaagtatcggccgccgtcaagccgatcaattcgccgagcttgacatgctcttccaaggtattgcgatcctccatgttaccgttcgcataatcggaattggtcgatgcgacacccacgctgagcatcgtgcggtaatttcccagcaccagaccctgcaaacggatataaaccaggcgaccgggagcataggtaatgtaatatcccgaagtcactttgatttcaatggccgactggcagctttcatcgtacaggtacatcgacttatagacgttaccggcctggtcgctggaaatgactttgccccgaatcaccaggtcgtcggtaatggtcagcgactggccgataccgctggtcccgggataagcctcctcgaaaatatccttcagctccttgatcgaaatgattttactgtcgctgaagtccgcatccgtccataccttcgcaggagccggcgtatcgaaatcgttataacagccgacgaagaacaaacttgctgtcaccgccagaaatatggttgctattctattcatattcttcacaatattaattcgttaagccgttagaaacggaaatagacattcaggtagtaagtcgtgccgaacaggtagaaatacttgggagcgaacttctggtaggaagtgatctccttgccggtcttaatgccctgcacacgcatctgctcataaccgccggtcttgatattttggttgttcaggatgttattcacctgcaaactgaagccgagcgtataacgacgctgaatgtagaaattcttaccgatgctcgcactcaaggtgtaggccgaatcgaacttctcctgactgcgcagctcccggatctgttcgtccgtcatcgtaggcaacaacacctcgtccgtacggtaaagcgggttcatcgacagatacatattgttgtaatagttcagatcgatcgatgcgtagatgttatgaggaccgcggtacgacaaaccgatattcattgccgtctgcggagtgctctccacgcgcatatccttccaatagaccgtaccggagttcagcggctcggcgctgttgtcggcaatctgcacgtaattgggattcgacgtgtaagtgtactgaccccaactgatcgcaccgttcaaagacaaaccgttgtagatcggaatcgaagcggcgacttccagaccgaaatactgctcgtcgataccgctcaaggcgaaattggtataggtcttcagcacgtcatcgtagaaggagatcaccttcgaacggtcgttcaccttcgtataataaccggaaacacggagtttataatcgccgtaacgcaggttgtacgaagcgtcgatgccgtaaaccttctccgtcgtaagccccggagttaccgaattacgcgtacggggcgaaacgaaggccgactggaacgcaggagcattctgcatcgccacggcgttgagttcgaaagtatggttggcattgatgacatagtcgaaattacctttggccttatatacgaaatattcgagtttctccgatttgcccttcgaattatccgggaagagacccttgcgccaaagaccttcgcgccacatcgaaagtccgccgagctcggcgcccaacttcatgccgaaaccgccgaaacgggtggcataagtagcccatacaccgccggaacgcagatgcgccttgtagttgtagctgaacttgtcgccctctctgacggctcttgcatgaccgtactggttataataatccatatcgttctgcgccatgatcggatcgccgaagtcgcgctgtgcgaatttatcgacgtccacgtaatagtcgccgccgagcagatccttcacctcgtcgtagtaccacgtgcggttgatgcggacgttggctccggccgtcagacgggagttatccttatagattcggctgatctgcgcggcgaggttccagtccaactggtcggtatggcgctcctcgatgatatagttcgaacgggcgccgggaccgtatatcgcttcatcctcggcattgcggaaattcatgttggtctggtacatttcgtcccagtcgaagtggcggatattacccacgttgcgcatccactgatccgccagactggccgcagccatcgaagcggcctccaggtcggtagcgttcagcaacttgtagctcggcatatagcggtaataatcgggacgggggtctgcaccgtcgtaccacgtcagcgccgaataaccgttcttaccgaaacggaacgaagtggccaggttgaactgggtatgctcattgggatcgaacgtatagttgatcatagcgatcggctcgtggctgttacgcacgcgcgcattacgcatcttgccgtcctggtagccccagttggggttgtaatagttgttgccgaccagatcgtaagcctcctgcgtggaagcctgctgcgcaccgcgctcggtgggagcacccataatcgtgaagcccaaccggtgacgcgaattgaaaatcttctcggccgaagcgaaatatccgtaggagttgtaatagacgccgtccacgtaggagttgccgccctgacgggtagataccgacaacgcataggaccagccgttgtccagcagacccgaaccataggtcaccatggcacggaagcgatacatcgaattggcgttcaccagactcacgcgaagtccctggcgcacctgcgaagcacgggcgttgatgttggtcgtaccgccgatgctacccacgccgtaatccgacatgatcgaaccgttggtgatctcctggttgcgcgtagcgtcgttcagaccgctccacaacgaccagggcgtatagcccgtcatagcgtcgttgaagcgaataccgttcaggtaaacgtccgaatactgcgaatcgtaaccacgcacgttgaaacgcatctcgctgaaccggaaggaagcgatgttgttaaaaacgtccttcgaagccgaaagggacgaaggcagcgactgcgcatcgttgccgctctcggtgtcgaactctgcgaagatcgaatcgtccattacggtcgaaagcacttcggggaccagaatcaccgtattgatgtcgcgcaccatcttgtccacgcgcaccacgagcgtcaaaggctcgaattcgggagcctcgaactgcaacgtatattcgccgggctcgacattctcgatcacgaaaccacctcggccgtcggtcgtggcagtcatttcaccgggagtgaccgaaaccttcaccccgtccaccgcgacacgtccctcgcgggaaacgaccttacccttgataccgccgctctgagcgaacgcggtcagcgacatcagggtaaatacaaaaattagtaaactttttattttcatatcctttcaagttaaggtatttatttaccgatgtagatataaacggggaagtggtcgctgtaaccgccctggaaattgtttccgacgtacgtgcgcaaaggatagcctttgaactgcccctctcgctggatcatatagttacgcttgaagacattcccgtagtacttcgatcccggagcccgtaccagacgcaactcgccgggcttcgcattgaccaggttttccgacactacgatattgtcgaagagattccaggcgtcgccgtaagccagcgttcccataccggcacgaagcacggcgtggaacggactgaagaaatcgcccggctgaagatccttgaccttgggtttggcattcagcccctccaacatgctcggatcggtcggatcgtcgttgaagtcgcccatcgccacgatcttggtcgcaggattgaccttcaggacagagtcggcgattcgacgcatctgctcgccgacggcgatacgcttgaactccgaagcgtccttgccgcccagacgcgaaggccagtgagccaccatgaagaagaacggttcgccgtcgatcgtaccccacatggtcgaaatatcgcgggttttgaaattcggaagcgaaggaatctgcgtgcggatcggtgcgctgccctccagcttgaagacatcgggacggtacataaaagcgacgtctacaccgcgagcttcgggagagtcgtagtgcgaaatccggtaattgcccggagccatcttcggcgtagcgatgatatcttcgagcaccgagcggttctccacctccgatacgccgatcacgatcggataatccttatcgataccggcaatatcgaaaagcaccttttcggtattgcccaacttcttcgcatacttgacagaattccattttttaggtccttccggcgtgaattcgtcgtcattgacctcgggatcgttgatcgtatcgaaaaagttctccaagttgtaaaagaccaccttgtacggtttctgcgcgaaacagcaggctgcgaacagtaaggccagtagtcctgtaaaaatcagtcgttttttcataagtcaaattagttttggattccccattggctcggagagttttgtgcctttacggattccgcagccgactcgggaatattgggaaagaacgtaaagccggtcttcttttcaatctccgccacgctcatgcaaatggacgcaggcggctgaatatcgccgtagctcttctgatccacccaaaatccgatcgccttcaattcatcggccgaacaatccgcgatgcgtttgccggtcgtaccggtgcgcgtgcgaagcaataccttgaaataattcgtcgggaccggacaaactttcccgtcacgatcggtcgtcgtcgtattggtattggcataatagcaaccggtcaccacataaagcgtgtcgttacatatctgcgcacgcaccttggcttcgagattggcccacatatcctggttgagccggttgagctgcggcgtcatattggtcgcatagaacgtctggagattcaactcccgcgtagccgtacggtccgccgaagggagctgatgtccccggtcgtaactgccccgataggaaccggccgcgaggttgggctgccaggaataatcgaccttcggatcgtactgaaaatcgtcggtacggtctatcgaccccctatataccgaatgcagcggataagccacccaatgcgccacatggagcgttttgtcgtagcagaacgaatagttgcgcacggtgcggttattgagcgaagcgaagtggctgacgtaaacgaaattctcatcgactcgcttttccggcaattcggcccaggccttcgcatgaccttcatcgtagggatcgttggtcgaagaggccgaaaactgcgtcagcacgagcacctgcggctcaccgccgaaaaattcgaattcgatggtcgccgaacgttccccgctcccggtattccgcgtataataaacgtccaggatattgctgatgttcgaactctgtacggtgccctccttcacgaggaccgtcggatcgttgagcctgaacgagcaccaagcacctccgtccttgatttcggcacgccatccggcgccgacaggtccctcaatctgtatggcggccgaaccctccgcagctccgaccgtcgaagaggtccgccatacggcagaaccccaaaaatcgtccgtatcgtcgccgcaagctacgacagagagcgcaatcatcgtcaggaacagccatttccatcccttctcacaatatctgaacatcgacatcatcggtaaactataaaaaactatccgagaaaccaaactcttggaggggatgatccctccaagagtttgaattttcaaaattagaaactaattctttttgaagaaataaattccatgcttaccctgcgtagcgcttgcatagccacgaatcatagttttaaaagaactatctaccgtctgcaacgaacaaccgccgtttgctgcaaccaaccgggactcgccgtctttatcaaccatcgagaatacccattccgcaggatcggctcccaatgacaatgaacggctcttggaaccggaagccaaatactgtccgttacacttgatataatatgtattagacttaccatcaactgcgacaagttccatttcagcaggagaattagttacattagcatctatcttggttaattccccgtttgcaaaagtcatttgaagcgtttcacaatctgttttaccatttccggttatcatttcaccggtccaaactccataataatcttctgccgcaggattcggttctgtagcagaaccggactgagcctcacctttggcacggaatccggccataaggtacgttccggccgaaagattcgacaagttgtcaatgagcgtgtaagtaccgccttcgccgccgccgacaccgagcagcgtaacaggcacctccttgctgttaccgttggccagcgtgatggtcagcatctgattaacgggctgcgtaccggtattcggatcggccttgaccgtcacggtcaggccgctgaccgtagcgctcaggggagcggtgaggccgcttacggagagttggttgttaccctggttgataacagaaaccgtgagcgtcttctcgccgcccgcagcctcgaaggagaggctggccggagttacccccgtaatcatcggggtcgaactgtcgctaaaagcggccacatcgtccagattgcgcggaacgagctgggaattattcttatatacggcagccagaccggagatattacccgagccagccttaaaaggtacgtcgaggaacacgctcgggttcttttcatcgctctgcttgcagaatacggtgaaattggctccatcggcagtgaaagtatgcgaagagagtgcgctggcgctcgcccaaacacctgcctgggcaaccgacgcattggcgatcgtcacggccataccctgatatttcgccagatccgcagcagcgatcgtcgccgtgggaatcgaagtcaccgtaccggtcttctcgaccttgcaccaagtcgcttccttagcgcccgtcacttcgtacataccactgtaatttaccaccttggcaagtcctttataaagggttacgcgcaccttgtcacccttgttcagaccgagcgtcgaaggttctacctgactaccgtagagcgtgatgccgttaccggcctccgtcgcattctcggtagcgaggatcaggttgttgaaggtataattggcaccggccacatcgttcatcaccacagcgtccagatagcgatctgcattggcatccaccggagcctccgtatcagtcatctgtgcgatcagctcgggaatggtaatggccgtagcctcacccggatcgggcggcaccacaccgccttcgagatcgacctcctgaccgccgttgccctcgacgagttgtacgtcatcgattgcgaataccgacgccagatcagccgtgaaacggatcgaaagctggccgacagcctccttgagcgtgaaatctacggcgaactggacccagtaaggatcggtcgtatcgctgccgccgatcttctcgtaagtcagattgcccgaccagtcggttccgttacctacggcaacgtggaacgattcgggtttgaaaatgttgtcgtaagtaccgccgttactctgcgaataagcaccgccgaagatgatccggtagttggtcttgcccgcaggcatcgtaatagtgttgatgtcgaaagtcgcaggtgccgaaccgaagaaaatcttgttcgaacccgaagcaccgtcgtaaccgccgctgagcttaccggaagtacgcaccgatacgttcgcagaggtataggtcaccgtcgaattacccgtaccggaagcattctgccatgcatcggtctgatcgaggaacggccatttattatcaaccttctcggcaggcgtcttgtcgaaattgttctcgtaaatcgcatcgccgctcggatcgggaggcacgacaccgccgcccgccaggtcgatctcctcgccgccgttaccggtcatcagcgtgatatcgtccagacggaacttcgaagatgctttcgcctcgaacttgatgtaaagcgtcgaagtcgcattcttgagcgtaaagttcttggttgcaaatacccagtaaggatcgacctgatcaccgtcgtttacctcgtaagacagcggagtatagtccgttccgttcgcactgagataaaccacgaagttgtccttgttgaaattattgtcattgttatcaccgtcgtaatactgtccgccgaaagtcagcttcagattggtctggccggaggcgagcgttatgtttttaaccgtaaaggttgccggagccgagccgaagaagatcacgttcgggcccgaagcaccgtcataagcacccgcgctgctcttaccggaagcgcggatcgaagtattcacgccctcgtaggaaaccttcgaagccccctcgccggtggtgttccaacccgtatagtcggcaaccaacggatacgggttcgcaacggactcgctacctgcggtttcgttgaagatgagcgtcggcggcaccacttcgccctgaagcacattgacatccttctgaatcaatgcgccgtaggagttgtaaacctcgaaagtcactttagcagactgaccgatgttcgaagcgggcaccgtaacggtcacggcagcatcgccctcgccttcggtagccgaaaggcgcacccaagtctgttcatcctcgacgatagcacgccagggacggttcgtttcaacgataaaagtaccgttgtactcatctgcgggctgtccctccgcatcgaacgtcaggttctccggcgtgacgttcagatagggagcgcccatgtcgtcattgtcgtcggtacatcccgcgaacaccgccacggcgaacacggtcaatgcactgaagagcaatttccaaatgctactctttttcataaacaattaaattttagagtgatataaaaataggttaaaaataacttcatcgtcttgcatatttactcaggccacttattcttaaactttttgtaaaaatactattttttcctgtttcgacaataattcgaacactattttcgtattacaatcccgttaaatcaaatataacgacacaccggatttttatttcgtatcaaaaaccccaccaaaccgtattctttcccggcaaaataaacacaaaaggcgtgcagttttgaccgcacgccttttttccgagaaatacgtccggtcagcgaatccggtcgagcgaccgcaccagcttttcgtcccggaagatcgcccgcaaagccagcaagtcgaaaaccaggcagaccaacgggaaaacgagcgaaattttaagggtatgggagtaaaattcactgtccgcgaagtaacggttgcaaaggtagaaatagattcccatcatcgccccggcaccgatgaggagcaccaactcgacggcacataaccggatctgcaccagacggcgcttgaaaaggaaaatcgtcaccaacggcaccagacaggcggcaaccagaacaacccccagatacaccgtcggcagcaacgtgatgcccgcggcatccttcaggccgaaagcggtcagcgtacaggtgtccgctccgacggtgaaatcggccagcggcagccacagcgccagtcccgtcagcacgacgaccagcaacagatacaaagtctgaatacgttgaatcatataacttctattttgtttatacgaacctcttcgaatcctgccgaaaatcacaggctctgcgaggtttattgattatccaatgttttttcgatcaggtatttattacggtctgcggcattccggtcgatcaactcgcccaggaatcccgccaggaacaactgcacgccgagcacgacggccagcagcgaaaggtagaaaagcggctgatccgttacggcccgcacaggcaggtcatggcactgtttatacaatttggcaccgatcacccatgccgtcgtacagccgccgaaaaggaacatcagcgttcccaggctgccgaaaaagtacatcggcgaacggccgaaacgcgagagaaacgaaaccgtaatgagatccagataccctttcaccatccgctccataccgaatttcgaatgaccgtacttgcgggcgcgatgctcgacgaccttctcgccgatccgcttgaatccggcctgttttgccagaatcggaatataacgatgcatctcgccatagacttcgatcgccttgaccacccggcggcggtaggccttcagtccgcagttgaaatcatgcagccggattcccgaaacgatgcgggccgtccagttgaaaaacttgctcggccaccgcttccccgccgggtcgtgacgcttctttttccagcccgacaccagatcgtacccctcgtcgaggaccatatgccgcagagccggaatctcgtccggcgagtcctgcaagtcggcgtccatcgtgaaaaccacctcgccgcgtgcttcggcgaaaccgcaatacagagcggcggatttgccgtagttgcgagcgaacttgatcccccgcaccgccgcaaaccgctcgtgcagactctcgatcacgcgccacgaaccatcgccggaaccgtcgtccaccaggatcacctcgtaggacaaaccctcgccgcgagctacgcggtcgatccattcgaccagctccggcagggactcttcctcgttgtaaagcggaacgacgaccgatatgtcgagcgtagcatccatcgttcttctactcttcggattgaggaccgaaaggccggggtgcacgcgccaggataccggccaaaataagccctaggacgaggccgacgatcaggttgccccagatcgaagcccatacggtagccagaatggaaggctccggcgcctcctgtatggttttcagcatttcggcgaatacgccctccatcgacgcaggaagttttccgtcctcggcgaaccggatcaatgcggaagtatatcggtcgatatactccgaatatccgatgaaaacactgcgatagaggtattccaccacccccttgatcagggccgacgacagaatcagggccagaatgaaacccagaccgcggctcaaaggaaatccctgttcgtgaccgtactgttcacggcggcgcttggcgaaacggtaaagcagcgcgatataaacgactgcggccaagatccacaccagccccatcgtcgaaaaccatcccgacaacatcaaggactgctctataacgaaagccacggacatgaccagtccgatgatcgctccgtacttgcagacctcgttccagaatttgaattttgtcattcttcttctatttttagcatatgtttattcccgcaatatacctttaccttcccgcaaaatctccggctcaccgcccgtcagatctacgacggtcgtcggcaccgcatcgccgacacctccgtcgatcaccagttctacgtcccggccgtaccgctcgtggatcaactccggatcggtcatatattcggtttcctcgtcatccagcacggaagaggtcagcagcggagctcccaaccgctcgacgatggcccgaggaatcgaattgtccggaatgcggatcccgatggtgcgacgccgttcgagcgccttgtgcggcatacgcgacgatgcatccagcaggaaggtgaagggccccggcagattttgtttcagcaaccggaactgagcgttatccacccggcaataatcggcaatctgcccgagcgaatcgaacacgacggaaaacgtcgtgagatccttccccttgatccggcgcagccgctcgacggccttcgccgaacggatcgagcagccgaaggcatagacgctgtcggtcggatagatcaccacgccgtccctttcgagcaggttcaccacccggtcgatctccttctcggaaggattctcggtatagattttaaccaacatagggagggcaaatatacggaaattatttaatattccgacgattcaactccgcactataagcccgggcattagccagatgttcgccgtacgtgcgggcgaaactgtgataaccgtcgaaagtcgggcgggcacagaagaagagatagtcgtggttctcgaagttcagcaccccatcgatcgcagcgaccgaaggcatcgcgatcggcgacggcggcagccccttgttcaggtaggtgttatacggcgaaggggttctcaagtgcttgtgcagaatccggcgaagcgaaaaatcctgcagcgcatatttgaccgtcggatctgcctgcaggggcatccctttccgcaggcggttgatatagactcccgccacacggggcatttcgtcggccttgttggtctcttcggtgacgatcgaagccagcgtcatcacctcgtcccggctcaaaccgctgcgtcggcgggcggcatcccgctccggagtccagaaacggtcgtactccttgcgcatgcggcgcacgaaatcctcgggcgaaaccgtccaataaaattcatatgtattggggatgaagagcgaaaagagctgcaggctgtcggtcccgacctcccgggcaagctgcgggtcggtcagtgcccgcatcagctccgcagaatcggcatcgagctggcgggccagccgcgaagcgaggaacgcacgggtacgggcatagttgagcgtaacgcgcacgggcgtctgcatccccagtttgagcatccgggcgatttcgacgacgttcattcccggttccagtacgtagtgccccggtttgaaggagcgctccagctccagacggccggcataccggtcaaaagcccagtgatggtccgtacggggacgcagagagtcgagcagccccgggtagtccgtgcgggcgcttatataaaggtcgctccgctcccggacggcatctccgaaaaactgaaagatgaaaaccaaagccaccgttgccccgactgcaaccgcagcaataaacacgacaagcaatctttttttcgccgtcattctcttcattcattaactctccccgcaccgccctccgagacacatccaggcagccttttcggcatccggctctcgaaaaacagcgacaaaatcgcagatagttccttttttctttgcaaagatacaaaaaattcgtacttttgtgctggggtaagtcttatacgaccagctcccacagactcccccaggtgaggaatcaagcaagggtatgtggtcgtagcggtgcgatataagtagcttaccctttttttgtgtacccgcccatttccggccgacttcaaaaaccgtcgataccaattcagggaacaatcataagcaataccgggaaatacatatttcccggtattgctgtattcctttcgtttcagcatcgaatcgagcaacgaaacctctgcgggacaaatattataatacgaataatattcagcactgcaaatatccgacttactaaaaatcaattgattttcttcaaaaaacgatcagttgttagccagcgcgatcgcagcgatcgcctccaccacgaccggacagcgcagggcgatgcaggcgtcgtgccgccctttgacgacgaactcttccatccgtcccgtcgcaaaattgaacgtatattgtttcttcgcgatgctggaagtaggtttgacagcgatgcggaacaccacgggattgccgttcgagataccgccgttgatgccgcccgctccgttggtagcggtttttccctctccgttcacaaaacagtcgttatgctccgaacctttcatacgggctgcggcgaatccgtcgccgaactcgatgccccgcaccgccggaatcgaaaatgccaggtgagccaattgcgattcgagcgaatcgaagaacggctcgcccaatccgacgggcaccttgtcgcaggtacactcaatgaccccgcctacggaatccaactcccggagcgtgcggtcaatcagctcgtcccagagcgtcggggcaccctcggcgcccaattccttccccggctcgcaattcagccgctcgcggggaataccgcccagctcggtgatccgggcccggatttcgatcgggccgatcatcttcttggccacgactccggccgccaccagcgtcagcgtcagccgccccgaaaaatggccgccgccccgcagatcgttgaaggcacggtatttccgttccgccacgaaatcggcatggcccggacggggcgtcgcgcgaaagtccgaatagtcgcccgaacgggtattgctgttgcggaatacgatcgtgagcggagcacccgtagtgtgcccgtcgcagacgccgcttacgatctccggcaaatcgctctccttgcggggcgtgcttcccttcgcaccgctgcggcgacggtcgagatccgcgaggaaatcctcgcgcgaaagcggcatgcccgcaggcacgccgtcgagcaccacgccgatcagcggaccgtgcgactccccgaaaatcgagagtctgaattttgttccgtatgaattcatagccaattaagtttcttcgagtttacttcaatcgtgtccggccccatcgtttccgcgcttcgccgcacggaaagcgttctttccgccggaacggaaataccatctgcccgccccgctactcctgccgggcgagcagatcgaggaacgaaggaaacgacttgtcgatgcacttcacgtcgtccagccgcaccggctccggcgtgaacaacccggcgacgatcaggctcatggcaatccggtggtcgttgtgcgaacggacatctcctccatgcaacggcccgcccgtaacgaacatctcgtcgccccggatgtcgatccgcgcccccagcgtccggaactcggcatagatcgtttcggcccgattgctctccttctgcgtcagacgtccgacacccgcgatacggctcgtaccgtcgcaatgggcagccagcaccgcaaggatcgggaacagatcggggcaatgcgtggcatcgacctcgaaagccttcagccgccggccggtcgcagtaacggagatgttctgcaaatctcccggcatatcgccccttgcggatgcgtccgcaggcgcgacgctcacatcggcaccgcacgaacgcaagatgtcgagtatcttttcatcggcctgcagcgaatcgagccgcatattgcgcagcgtaattccctcggtccgccccagcgacgaagcgacggctccggccaccgcgaaataggcggccgaactccaatcagcatccaggaagaggtccgaaggacggtactcctgcccgcccggtaccgaaaagacgattttcgaaggcgtcccgggcttccgtccgccgcaccccccgtcgtaaaacgcctccctgtcgagtcggataccgaaccgagtcagcgtccgcaaagtaagctccaggtagggaatgctcgacggctcggttaccgtcagcacggtcgcatcctgcaacaacggcaaagtcatcaggaaacccgatacggtctgcgaactctcccgccccgaaaaggcgatctcacgacgggtaataccgccctcgatccgaaacggaagatacccctcctcacgagcagaacaatgcacgccggcttcgcgcagcgcggcgaccgcctcgtgcagattgcgcttcagaatactgccatgcccggaaatttccaccggggcaccgccgttcaaagcggaaatatgggatgccagcggagtcaacagccgcgtgagcagccccgattcgccggtttcgatcttcgtgcaacgtcccaagcgctccgctccgacaccctcgatatgcagcgtcgtaccgtccgacgcaatccggcagcccataccccggatgacctcgacggctccgactatatcgttgcaaggggcgtaattggcgagccggctctctcccgcagccagcgcagcagccaacacggcccgctgggccacgctcttggaacaaggaacggcaaccgtcgtccgacggaactcgcgaaatccctcgaaaggataattttcggccgaaagcagccgctccatctcctcgcgggtatattgccccgacgccgtggcgttggatgctccagctgaaacatacgtataaggcgcaccgagcttcaggcagagcagacgggtgaatttcccggcttcgcccatcgaaaaagcgaccaactgcggacgctccgcagcggcggcaccctcgaaaagcgctccgtcggcttgcaggtcatacaaacgcatcgtacgggcggcatccgaaatattccgggccgtcgtgacgatcttcaccagatcggcccccttcgtgcgacacagccgggcgatccccttcagctcgtcgagggagggagttccctcgaaatcgtggaacgaaacgatcagccggcacccgtactcgcgggcgagcgtacgaatatattccagatgctcgtcgggcgcttcgatctctatatcgacataacgcgcccccctgcggatcgccgcctcgagctgctcgcgggcgaatgcctcggaagagttcgcaatccggcaggtggcaatcaggttcggccgaatctccacgagccgctcgacctcttcgaccgaaagacggcaaaggtccgcccggagttcggccatttcacacgattcgaggatcgcccggcaatccccgaaactcttttcctgtacgctaacgcagatcacgggcgacctcctccaactgttttaacggaatcgcacgatccaccacctcccccaccgcacggggcaggatgaaatgaatggcatcgccctccaccttcttatctttttccaacgcttccagcaaaacaccgatagctatgggcgactgggtgggaagcccgaccttcttcaaatcctccgccagaccgaccgccagtcccgccggggcgagtcccagccgttcggataccccggcagccagcaccagaccgatcgccacggcttcgccgtgcatgatcggacaatttttctcgatggcgtgagcgaaggtatgccccagattcagcaagcgccgctcccccttctcgaaagcatcccgctccactacggcacacttgtataacgccgttttgcgaatgatttcggtaagctcctcctgcccgtacacacattcgcccccgcaacaggttcccgctttccgcaagtgggcctccatccgggcgaaataatccacggccttgcgatagtattccgcatcgaacaggatgaaagtcttcaggacttcggcgattccggcccggaactcccggggcgaaagcgtccgcagcgcatcggtgcagatatagatccattcaggctgggtgatcgtaccgaccatattcttataggcatggaaattcacgccgttcttacccccgatcgaagcgtccacctgcgccagcagcgtcgtaggtacgaaaccgaaccgaataccccgtttgtaaaccgacgccgcgaaaccgcagaggtcggtcgtgatgccgccgcccacgcccacgagaaacgaactccggtcggctccccgctccagcaactgttcgataatatattctaccgtagcgaaggttttaaccttctcggaggtctggatcggaatgagttcataccgttcgaaaaggccgaaaaagggcttcaggttgctgtcgataacgacgaaaacccgtcggccctgcggaatcagggcatccaaaccgctgaaatcggatgatatatgaagattactcacgtttattcgaaattgtttgtcccgacaaatttaggaattttatgcccgaaataaaaaagcgaaaaaaattttgtcattttccgaaaaatgcgatacatttgtcccgttaaataccctggacggatattcgacgacaaaaacgatatgcaacacgttcagtttacatactcctattattattacctttattcgggccgagtaaaggcgggagtttgcgtgttgtaaagttcgatcgacagaattacgaatttagatcatagctcctgccttgaggcgggagcttttttgttttcagtatgaaaaaacaacaacctgcggagcttggcggctccgaagaaacgaaaccggcaaaaccgaccgtcaccccggcccgccgggtggaaaacgtcgaggagtactacttctccgtgaaactgaaagaggtggcccggatgaacgaatccggcacacgtgtcatcaacttggggatcggcagcccggacctgcccccgtcggccgaaaccgtgcaggtgctctgccaggcggcagcgcggcccgacacgcacgggtaccaaccttacgtaggtattccggaactgcgtgcggagttcgcccggtggtataagagatggtacggcgtggacctggcccctgctaacgaaatcctgcccctgatcggcagcaaggagggtgtgatgcacatttcgctggccttcctgaacgaaggcgacggggtactcatacccaatccgggctatccgacctacgcctcggtgtcgaagctcaccggcgcccgcatcctgccctacgccctgaaagaagagaacgactggcagcccgatttcgaagcgctggagaaaatggacctgtccggtgtgaaactgatgtggtgcaactaccccaacatgcctacgggagccaacggttcgcgggagctgttcgaaaaactcgtcgccttcggccgcaggcacaacatcgtgatctgccacgataacccatacagcttcatcctgaacgaccgcccgttaagcattttgagcgtgccgggagccaaagagatctgcatcgaactcaactccatgagtaaaaccttcaacatgcccggctggcgtatcggaatggtggcgaccaattcccggttcctggagtggatcctgcgcgtgaagagcaacatggactccggaatgttccgcccgatgcaactggccgccgtcgaagcgctgaaagcccccgacagctggtaccaacggatgaacgaggtatatcgccgccgacgcgcactggctgcccggattctggaaaccctcggctgcgatgtccgcgacgaccaggtgggaatgttcctctggggacgggtgaacgataccctcgcggcgcaactcacggctgccggggagtgcccgaacggtgtcggggaagccatctgcaaccgggtgctgtaccagtcgcgagtcttcgtcactccgggcttcatcttcggctcggaagggcggaactacatccgcatctcgctctgctgcaacgaggagatgttgcaggaggcactcgaccggatcacgacgacccgaacaaaacagaatcagtaaacagaatataaacagaccggattcgccggttacagccggcgatcgcaaaatcaacaacgacaatgaaaatggaaatagaaccgctcacttttccgggcgtggatcccaaacgtccgatgattatcgcaggcccttgcagcgcggagagccgtgaacaggtactcaaaaccgcctccgaactggccgcccggggcgtaaagatcttccgggccggtatctggaaaccccgcaccaagccgggcggcttcgaaggcatcggcgtcgaaggccttccttggatgaagcaggtcaagcaggaaaccggcatgctggtagccaccgaggtcgccacccccgctcatgttttcgaagccctgaaagccggcatcgacatcctctgggtcggtgcccgcactgtcaccaaccccttcgccatgcaggagctggccgacgcattgaaaggcgtggatatccccattctggtaaaaaaccccgtcaatcccgacctggaactgtgggtcggcgcgatcgaacggctctacaacgccggactccgacggctgggcgtcatccaccggggattcagctcctacgagaaaaaaatctaccgcaacgctccgctctggcatattccgatcgaacttcgccgcagataccccaacctcaccatcttctgtgacccgagccacatcggcggcaaacgcgaactggtagctcccatctcgcagcaggcgctcgacctgaacttcgacggacttatcatcgaatcccactgcgatcccgacagtgcgctgagcgacgcggcgcagcaggtgacgcccgaagtgctggactacacgctgcaactgctcgtggtgcgcgacaatgcccaaaccacagagaacatcagcatcctgcgccgccagatcgacgaggtcgatgagcaactgttgagcctcctcgccaagcggatgcacatctcgcaggagatcggcacctacaagaaggagcacaacatgcccatcctgcaaaacaagcgttacgatgaaatcctggacaaacgcggcaaaatggggcaatcgctcgacctcgacccggaattcatttcggaaatcatgaaagcgatccacgaagagtcggtaaaggtccagatggaaataatgaaataacgacgttcccgataagcgaagacagcaccgaatttattcggattatgccgtgcgaagaaaacgaagaagcgattcaatgttttcggcaaacggggacggaagttgccgacgacctctgccgagcgaaaaaacgaagaatgaaatagaacaatccccgggcgctcccataccgcccggatcatcaaaaaacataaacaaaccgatatatgcgcatactgattttgggcgcgggaaagatgggctcctttttcaccgacctgttgagtttcaaccacgacgtagccgtcctcgaaaaagaccctcggcggatgcgattcatctacaacgcccagcgcttcacctcgcccgaagagatcgccgacttccggcccgaactgcttatcaactgcgtaacgctgaacgccacgctccaggcattcgaggaggtatttccctatctgccgaaagagtgtatcatctccgacatcgcctcggtaaagaccgggttgcaggaattttatgagaaatcgggattccggtacgtttcgacccacccgatgttcggccccacgttcgccaacctgggcaacctgcaaaccgaaaacgccatcatcatcaaggagtcggaccacatgggcaaaatcttcttcaaggacctctacggttcgctgaagctcaacgtctgcgaatacaccttcgaggggcacgatgaagttgtggcctactccctctcggtgccgttcgcctcgacgctcgtattcgcctccatcatgaagcaccaggatgcccccggcaccaccttcaagaaacacatggccatcgcccgcggactactctccgaagacgactacctgctgacggaaatcctcttcaaccccaagacgcccgcacagatcgacaacatcgtcgccacgctgacccacctgtcgaagatcatcgacaaaaaggacagcgggaagatgaagcggtttctggacggagtccggaaaaacctggagtaaaaatcgtactccataaaaaacggccggtatgttaccggccgtttttcatatcgggtcgatccgctaaaaactcaacttcacacctgccgtaaatccggcgctgtactgcggaaacgtactccagtcgtaaatccggcggttgcaaagattgtgaccttcggcgaataccgttacccgcttggacgcgtaccaatcgacattcaaccccagatctaccgtatagggaatgcgcatattccccacgatcccgtcgttcgggaaccacggaatcactcgcgaaatatagcggttggactgcaggtcgaaaacgaggccgaccgagaacttacgatgatgatagcgggcccggaccgtaccctcgaactccggcaggccgatgctcaaggtctgatgctcggtataggtcagtccccgcccgccgatggagaacgtgaaattgctcaccggacggaactccagctcaccgttgagcgacatgacattcagccgtccctgtaccagactgaacccctcataccgggtagtcggcgtatagcaataccaaaagttatgattctcgatgaaagaatagccgacgaacaatcggtaaatcagcttatcctcgacgagacgcccgctcacaccgacacggaccgaatagtccaccgtattgcggggcatcaggtccgtataacgaggcacgtaataaagattggtttccataagctcccgcatatcgttgtgcttcagggttccgtccaactcgacataaggtacgaaaccgccgccgcccagatcgaaacgcaagtgagcgtagggaatgaaataattcgccgcatcgcgccccgccacatcgtcccggtagtaatccaaaccgaactccatatcgaccgaccgggcacgataggcataacggaacgctcccgaataggtccggttgtaatagtcagaaggagcggcccaaaccgattcgcccttgcggtcgccaccccaccggccctcgaatccggcccggaagacgagcgtatggcggccgaaacgtcgtccaacggcggcatctacccccaaattccactcgttttcgtacggataatccaacaccggaacgacattatcctccagatagagtttcgaatccagcggattccaccagttgcccgccgtgacctcgacattgaaattcgtccgcgagaggtcgttgaaatcgtcgccgatccgtatctttccctgcaaatcgccgatcacgcggcgatttccgttgtcgaaagtcggaaagtccggatcggggaaaaggccgtaacggtcgatgatccggttccggtagctcacctcgccctccagcacatgacgcccgatgtatttcccggcggcgacacccacccgattgtccatccacagggcgctatggtccccgtcgggcgtatagggaatccgtccgtaccgtccgtcgtggttgatatagcccaacgcatagccgatgtcggggttctgtgtcgatacatacagatcgagcgccgaattgagcggataacccgctccggccttcaggtaaaaaggcagcggacggtcgaactcccaataggtgatcgtcgcaggacggatcgggcgcgtggcgagctgcgtttcgagcgtgagcggcgtgatcgaatagtcgatttccggctgtatggccgccgtatcgaccatattggggcgcacggcaagtttcgtcgcatgctccacgctcggcacataggctttggatacttcgacacgcttctcgacctgggcgttgagcaccccgggcaccgcaagcatcccggcgataaacatcagggacagaatagctgatcgcttcatatcgttaattgagtttcttgattttctctttcgcttccgcaacgattccgtcatcggcgggggtatagccgtccacgatactctggtaggtcgcccgggcctggaacatgtcgcccttctgcacataaatatcacccagcacaaggaaggacttggccagccagaaggcatgaggcgttcccttgtccgagaaatcgagcaccagtttttcggcacgagccgtatcaccggcccggaacgcggactcgatcacccggtaggccgactcggctccctcggatgttttcacattggcgctcaaaaccttgtagatcttttgcgcggcagcagcatctccccggcgatccagaatcccggccttcgcaaactgggactctcgccatgccaggtcccccgcagcggtgtaggatgccacatcgtcggccatggacagaatccgctcctcgtcccccgccgcgatcgtcgcacggacgtagccgttcatggcctcggcttttccggcagcggtgctttcggcatcggccaatttgcggtaagccgccgcagcttccgtaaagcgttcatcggcaaaagtcattccagccagcgtcttcaaagcccgatgcgtgtactgattctgtcccgcaccggccagagccgcgagcgtttcgatcgcacgggatcgttcgcccgtcttcaggtagcaatcgctcagacaatagagcgcatcggccgtataatatcccttgggataactttcgagataactgcgcagcgacttggccgccgacgcaggctcgcccgaaagatagatccggcgggcggcagcgaacgaaagcgaatcgcgcgacatggccgtaaggtccccttcgacaccgctcttccgggcataatcgaaataaccgccggcatctccttcggagacgtaaatatcccgaatcccctgcaaggcatccttggcatcggaggattggggagcggtcttcaccaccatatcatagtaggaaagcgactttttcttgtcgcccaggttcaggtaagccagtcccaactcggacaacgcggcactccggtagggcgaataaacataggtttcgacgaaatgttcgagcactgcagccccctcgcggtagcgctcctgcgctacgaaagtacggcccagttcgtaagtcgcatcgtcgaggtaatctcccctgccgtcgcggataatctgctgcaacgccttgattttttcagatgtacgtcccagaataccgagcgtaacggcccgctggtagcgggcgtaatccgctccgtcgtcggacgcggccgcagcctgtccgtaatacttcaacgcctcgtcgaactggcgatccgaatagtaggtgtcgcccagacgattgcgggcatccgtgcggtaaccgtcctgagtgggatacaattcgatgaagcgaacgaacgactcccgcgcccggggcatattctccttcgagaagtggcaataccccgtattgtagaaagccatcgcatattcgggctcggttttcggcgcccgcttcaggtaggactcgtaatcgcgcagagcaacgtcgtaatttcccctgccgtaagcgatttcaccctgccaaaaggttgccagcgcattgtatttgggactgattccgatacgggcggactccgccagataacgcccggccccctgcgtatcgcccttttccagtgcgctcaagccgcggaaataggcgatcttctgcttggcggccagcaggtcgccgtcgggatcgggataggaggcgatgatctcgtacgcttcgtcgtaattgtgcgaattgtaataggccgccgccaacagctctttggccgtgcgtacacggggcgacgacggatactgggcgacatagcggttgagtacctgaatcgcttcgttgaaacgtccgccccccagttcgtattgcaattttccatagttgaacagcgcgtcttcggcaatcgcggaatcgaattcggcattcgaagccatggcgaacgactgcatcgcctgctgcttgtccccgccgcgcaagtaacagtcggccaggtggtaggaggcgttctgcgtcagagcgtcgtcggctccgcacgccttgcgcagatactctgcggcatcgtcgtagcgggccgtacggtagagggagaatccgtagagataattttcatcccggcccatttctccgccggcctgcacgaaagcgtcgaggtaatccagcggtttggaatattcgcccaagcgaaaccacgcttcggccatgacccgcgagagttcggcccgctggcggggcgatgcccggcggatcaactcttcgccgttctcgaccacgtagcggtaattcccctgcttgaactcgatttgcagcaggtaatagggcgctacctcgccgtaagcctcgcttttaagcaatcgttcgaacccgcttctggcccagtcgtactgttcccgcgcataggcgatgtaggacttataatagagagcgtgatcgtaaaattcgctttggggattgatccggtcgaaataggtcatcgcccggtcatagtcatcccggccgaattcgatatatcccatgcgcaggtcgtactgctcgcgccgggttctgtccaaagcccggtagttcacccgtccgaaacatgcgagcgccttgtcatactccgaccggctgcaataaagcaacccctgggcgaaccgcaggtcgttgttgtaaaccgactcgggataacgcttggaaaagtcggcgagcatcgcctcggcatcccggctgccgagcttcaaggcacaaaccgccaactgataatcgatctgctggagcgtaagccggtcgtcccggtccgctccctcgcgggccttcagcaattcataacgggcatctgtccagcgcccgtgatcgaaaagcgaacgcccccgctccagatgcgcccgggtttccggtgccgcagcatggctcccgacacaagtgaacaggcaaatgcctatcgacaataaatacaggatgtttctcttcataacgcacacacaataattcgaacgcagatagcgaacacccggtggtaagtccgacctgttcagcgctgcccgaggcgcttcctgcccgaatcaaaatattttttcggtaaagatagtgaaagccgagagaaaaatggaaacttgttcccaattttccgaggcgcatcctatctaagactatgtcaaagatcgtgaaaggtgagggcaatcgtgcgggcttgcacgcaaagattgccgaaccgcctccgatcttttgcaaagatagtgaaaagcgagggtaaccgagagaacttgctctcgaaaattgccgaaccgaatcctatcttctacaaagatagcgaaagccgggcccagcgccaaatttatttagccccagtcccgtgcattcgttcaaatcggagtcatttcccgtaaagataacgatttcccggggcagacgcaccatttgggaacgattgttgcccgacagaaaagaaaaaagaatcttttcgacgaacgaaggcaaaaccgcccgcatattctgccggataaaaacaaaaaaaagaaaattcaacctaaaaatttatcgttatgatccaacaggtaactatacagatgacttcggcacggacctatgtcctcgaaggaaacaagaaatgcgaccaactaaatcccaaagagctgatgttgctggccggcgtaacttgcgcaggcatgaccgcgatggcgatcatggaaaaggagcgcgtatctccgacccgcttcgaactcagcatatcgggtgaactcgacacggaaaccgtacaatcgagcagcgtcttcaaatctttccgcatcgtctataacgtacaatgcgaatgcgaaaacgaccagatgaaagtaagccgggccatcaacctggcccacgacaaacattgcggcggcgtgcagatgctgcgcaagatcgctccggtagccgacgaaatcgcgatcgtcaatacgaaataggccgaagcactacaaattacgaaaaagcaacgaaagggctgtgtcgaaatgaaagttccaggcacagcccttaaggttgtcagaatggatgcaatgcaaggcattgaaggtaaaggcgacaggaatttactgccgtaaatgactcgcccgctcccgataatgacacaacagtgcgcctttatgacacacggtcttttatcggaaggaatcgcccttccgcatattctctacttccgacaatacccggaacgtctgtcccggtactccgtcaggcaggaaaccggaactcacccctcgcctccgcagcccggagcaaccccggcttccgcgcatagcaccggaaatactgacgcccgattcagtctatgtcccgacagttccgcttgtcggcgattaccccgtcgtcgagcacgacaatacccgtatgagcccgcaacatggtcttgagcgtcgatccatcgatgttgtagcaaggaaccggcgtgcttttcccgaacgaatggatgccgtttccctgcaagggttcgggcgtgatgcagacgacatgcgccccttcctgcaacgcacgctccacgagccgctccaaacgatcctcgcacctgcggccgatgcggtcgaaacgcgtcacacagatcaaatagagccgtcccggagtagcgagcacccggtcggtcacatcttccgcgccattgcgcagagcgaactcctcgatcatcggattcatctccggtacctctcccagaattttcgtatcgacccactcccagaccgtatcgtcctgccactccgtatcatcgagcgcaaactcccgctcctcccccgtcatgcgattgcgataaaccagtacggtctgcaactcgccctcgggaccggccgcagaagaggcgtgcatctcctcgcggatattcaccccgatcttatacggcagaaaatcgatcaacggaagatgacaatagcaatagaaccccagccccatcgtcagaaggaagaaaaaaatcgtcaaagcgacctccgaacggcggaaggcaagaatcttatcgttccggtaataagcccacacgacggccgccatcggcagcaaggccaggttcttgaagaatgtttcccagggggagagtttgatcgcctcaccgaaacagccgcagtcctcgaccgggatgaacgtcgcactcaaaaaggtaaggatcgtaaagaaaagcatcgacaccagagcgaagatcgacaccagccggatacgcaccttgcaaagcagcatgcaacccatcatcatctcggcgccgcacagccagatcgaaaagaccatgctggccggaatcagataatcgaacccgtaaatcgtgaggtattcgttgatcttgatcgacgttccccagggatcgatcaccttcgtaaagcccgacacgatgaacacgacggccagcaccaggcggcaaactccggtaatcaggctccgggcccgttgcgacagcataggtttcatcattttcgaacaggttatatacgatcttttcttcattttctccgcaggcatcccgcactcgtccggagtcgttctcatcgttaaaactcaaaacttcccgcctttcggtctgcgtccgagcgtcccgcaaagccgtttcggattgccgactttttccggactcccttttcgctcaacgctccgcatccgtcgggacacggacaaaacgactcatccgcttatcgaatataccgaaccgcccctccgggcacttctccggtatcattcgaaaaggcgctcatctcatacactaattccacgcttcgttttctccacccggcacaatccacacaaattcggctctgccccgcttaccgaaaacgttgaattgacttcttcgttttcttcgctcggcatagcccgcaagcggtctctgccctcgcttatcgaaaacgttctatctcggtgcggatgcgggcaaaaatcgcatcgggagagtccatcccgccccgcgcatcgctgcaatcgataatccgcaggcggtcgtccgcagcagcggctgcacggtaaacctcccgcacacgacgctgcaagtcgagcgatgcctcatggatgtcgcgctcccccttcaggtagtcgcggtcgtcgccttcgcgtacctcggagagctttttctccgtaaaggcgaaaggcacatccagaaacagcgacacgtccggacggggaattccgtaatagccgaactccaggtcgaggatccaccgccgcagctcctcctgccggtccccggcaggcaatttggcgcactggaaccccacgttcgaatagacataccggtcgagcacgacggcgtggcccgcatcgagccaacagcgcaactgcgcggcagcatcggcccggtcaccggcgaaaagcagagcgaccagataaggatcgaccttgtccacagccccgagttcaccccgcaggaagcgggcgatcagctcgccgtacaccggcgcgtcgaaacgcggaaaatggagaaaatggctctccaccccctcttgggcaaacatgcggcgcacaagttccacctgggtcgatttcccggcgccgtccagtccttccaatactatcagcatatccttgctatttaagcatcttcacggcccgctcgaccccggcgaccagggcgtcggcttccgccagcgtattatacatcgcgaacgaagcccggcacatacccgtaactccgtaatgcgtcatcaccggctcggcacagtgctgtcccgtacgaacggcgatgccgagcttgtcgaggatcatgcccatatcatagggatgcaccccctcgacattgaacgatacgatcgcacacttgtccggcgtcgtaccgtaaatccgcaggccggggattcgctccagcccttcggtagcacgcagcagcagcgcccgttcatgcgcctcgacctccgccgcatcgaactgccggacatagcgcaccgcttcgcccagcgcgatcgcccccacgaaattggccgtacccgcttcgaatttcaatggaacaggtgcaaaagtcgtcttttcgaacgacacccgatcgaccatgtcgccgccggagagaaacggaggcatccagtcgagcaaatcccgcttgccgtacagcacgccgatacccgtcggggcatagagtttatgaccggagaaggcgtaaaaatcgcagtccagcgctttcacatcgacaccgccgtgcacgacaccctgacatccgtccaccaccacgaccgcaccgacccggtgagcctcgtcgatcaccggacgcagatcgggccgcgtgcccagcgtattggaagcctgcgtcaccgccaccacgcgggtacggccgtcgagcagcgccggcaggcgctcggtcatcaggcgcccctcctcgtcgaaaggcagcacgcggatttcggcacccttgcgctcggcgacaagctgccagggaacgatattggaatggtgctccatctcgctgaccacgatattgtcgcccgcccggagaaaacgttcgcaccatgcatacgccaccgtattgagcgacgcagtagctccggccgtgaaaacgacctcctcccgggcttccgcaccgatgtactcggcgatacgagcccgggcagcctcgtacatctcggtagcctcctccgaaagaaaatgaaccccccggtggatattggcattcgactcccggtgcaggcgatcgaccgtttcgatcacgcactcgggtttctgcgccgtagcaccgctgtccagataaaccaacggcttgtcatacacgcgcaccccgagaatcgggaagtcccgccggactttttccacatcgaacataacgctatattttatccaaatgccggacaacggcatcggtcaatatctctttcacggcttcgatccggcagcgcccgaccacgtccgccgcgaaaccttcgatctgcaggcgccgtgcctgttcctctttcagaccgcgctgacgcatgtagagaatcgcttcgtcctccatctgtcccaccgtcgctccgtgactgcaacgcacgtcgtcggcgtaaatttccagttgtggacgcgcatcgatgcgcgaagtgcggctcaacagaatattacggcactgctgctgggcatcggtatgctgggcatccggcgccacataaaccaatccgcagaattcaccacggccggtccccgaagcgacgcccttgatgagcgaccggctcgtacagtctgggaccagatggttggtacgcagatcgaccacgcagtgatcctgctccaacgcgagaaacagcacgtccagctcattggaagcctcccgtccgttcagatcgaaccggtaacgcacattcgcactggtaaactggcacgccgtcatgcgaaacttgctcccggcggcctgctcgacctgaaaatcgacgaatgcctcggccgagaaaagctggacaagctccgcatccgccccttcgagcagcttgatacgaacctctgcctgacagggtttcgtatgcagcacgaccagccggagcgcggctccgcccgcgacctcgacggtcagtttatcggtatcccgcaccaccagcggacgcgacaggtcgcaatcctttccgaggtgcagttcgcggctcttgaccggctcgaaagccgggccgctgaaaatatcggtccactccatggctactccttataatcgttgataagccagtcgtacccctctttctccaatttgagcgccagcgaacggtcgcccgaatagatgatgcgccccttgtagagcacatgcacgaagtcgggcacgatgtaatccagcagacgctggtagtgggtgatgacgatcgtcgcattgtccgaccggtgcaacttggtgacgcccgtaccgacgatgcgcagcgcatcgatgtccaaaccgctgtccgtttcatcgagaatcgccagcttcggttcgagcatcgccatctggaagatctcgttcttcttcttctcgccgcccgagaacccttcgttcaccgaacgggaaatcaatttggagtccagttccacgatggcgctcttctcccgcaccagcttcagaaactcggccggcgcaagcggtttctcaccccggaacttgcgctgttcgttcacggccatcttcataaagttggccatcgacacgcccggaatctccaccgggtactgaaatccgaggaacagccccatgcaggcacgctcctcgatgggcagcgacagcagatcctgccccaggaaggtcgcctcgccgcccgtgaccgtgaatttctcgttcccggccagcaccgaagccagcgtgctctttcccgagccgttcggtcccatgatggcatgcacctcgccggccttcacctcgagatcgatgcccttcaatatctcttttccggcgacttgcgcccgtaaattcttgactgaaagcatatctattttactttttttacattcataaacgcaccgccgactccgtttctacccggaaaccggcggaaattcttccgacaaactaccctaccgaaccttccaaactgatggccagcaacttctgggcttcgacggcgaactccatcggcagtttgttgagcacctccctggcataaccgttgacgatcagccccacggcatcctcggtcgtaagcccccgctggttgcaataaaaaagctgttcctcggagattttcgaggtcgtcgcctcgtgctcgaccactgccgtcggattgccactttcgatcactggaaaagtatgtgctccgcacttgtcgccgatcagcagcgaatcgcattgcgaatagttgcgggcattttcggccgccttcgccacgcgcaccagcccccggtaggagttctcgctgcgaccggccgaaatacccttcgatacgatgcggctgcgggtattacgccccacgtggatcatcttggtaccggtatcggcctgctggaaatggttggtcatcgccaccgaatagaactctccgaccgaattgtcgcccgccagaatacagctcgggtatttccaggtgatagccgaaccggtttcgacctgcgtccacgacagacgggcgttttcgcggcaaattccgcgtttggtcacgaaattatagacgcctccctttccctccttgtcgcccggataccagttctggacggtggaatacttcacctcggcatccttctcgacgacgatttcgaccacggcggcatgcaactggttctcgtcccggcggggcgccgtgcacccctccagatagctgacataagccccttcgtcggccacgatcagcgtccgctcgaactggcccgtacccgccgcattgatgcggaaataggtcgaaagctccatcgggcaacgcacgcctttgggaatgtaacaaaacgaaccgtcggaaaagaccgccgcgttgagcgccgcataaaaattatcggtataggggaccacgcttcccagatatttctgaatcaactccggatagtcccggatcgcttcggacatcgaacaaaagatgattcccttttcggccagcgtctccttgaaggtcgtcttgaccgatacggagtccattacggcatcgacggcgacacccgccagcgccatctgttcctcgagcggaatacccagcttgtcgaacgtgcgtttgagttcgggatcgacctcgtccatcgacgcgagtttcttggagggcttcggcgccgcataatagatgacgtcctgaaagtcgatcggagggatcgtcagatgcgcccacgaaggagacaccatattcagccagtgacgataagccttcaggcggcgctcggtcatccactccggctcgcccttcttggtcgagatcaggcgcaccacctcctcattgaggccgcgcggaatggtttcggtttcgatatccgaagtgaaaccgtacttgtactcctgcttctcgatattttctataagttctttatctttctctgccattgtatgcgaaataattatgcaaaattacaaaaaaaatgcaaatccttcccgcccgaccgtttttttagccccgcagaaagcccccgcgcatcaaaagcggttaaaatatatatatttgtgccgacttaacaagcaaactccatgcaatccggcatcaaactcatctcgagaatctacctcaaactcgttctgctgcaagtagccgtcggcacgctgctgcgcatcgtcctgctgttcaacgaacagacctccgacatctcgttcactttcggccaatggctgaaaatcttcctgttgggcgccgtgaacgactggtgcgcccttacgatcggattcgccgtactgtggctcttcgccttgagtatcgccccgggcaaatacgcccggccgctgggctacatcctcttcggcatcctttcggtcgcatggatttacgtcacgttcttcaatacgatcttcgacgaatacggcagcgtggtacccctgatcgcctcgatcctcttcggcttctgggccgtgagtttcggactcagactgttccttccccaaatacgtccgggatggagacgtacctggctcgccgttctgacgggactttacacgggcggcattatcctgaacgccgtttccgaatggtttttctggagcgaattcggcgtacggtacaacttcatcgccgtcgattacctggtctataccaacgaagtggtcggcaacatcatggagtcctatccggtcgttccgctcttcgccggcgtgctgctgctgaccgtaggatgcacctggctgctgttcagacgggagatccgccgtgccggagagttcggcacctggcaatggaaagcggccgtatcgcccgcctacctgctgctcaccctgggctgctgcctgctcctgcagttcaacacccgattccagcaaagcgccaacacctatgccaacgagctgcaagccaccggagcctacaagttctacgacgcatttatgaagaacgaactcagctatccgcagttctacctgaccctaccgcagaaagaggccgaagccaacgtacacgcgatctacgggagtaccggcgacaacctgcgccacattcccggcaacccggatacgctgcgccgcaacatcgtgctgatcaccatcgagagcatgagcgcctcgttcatgcagcatttcggctatccggacgcgatcacgccccacctggactctctctacaaaatggggatcgctttcgaacagtgtttcgccacaggtaaccgcacggtgcggggactcgaagccgttaccctctcgctgccgccctgccccggacagagcatcatcaaacgtccccgcaacgacaacatgcactccacggcggccgtactccgggagaagggttacgatgcctactacttctacggaggcaacagctacttcgacaacatggaaaccttcttcggcggcaacggctaccgaatcatcgaccaaaaaagctacaaacccgaagagatcaccttcgccaacatctggggcgtttgcgacgaagacgcctacgacaaagtgatccgctcgctcggcgagcgggccgatacgaccgcagcgcccttcttcgcccacgtcatgacggtcagcaaccaccggccctacacctacccggcaggccggattccgattccgaacgatgcgaaactgcgttcgggaggcgtcatgtacaccgactacgcattgggacgcttcttcgaagaggccagccgccaaccctggttcgataacacggttttcgtcattacggccgaccattgcgcctcgagtgccggcaaaaccgaaatcccgctggagaaataccacattcccgccctgatcttcgctccgggactcatcacacctcaacaagtagataaggtgatctctcaaatagacctgatgcctacgctcttctcgctgctggggatggattacgactcccatttcttcggtcaggacgcattgtccgacgatttccgggaacgggccttcgtcgccacctatcaggacctgggttatctcgaaggcgacgtattcaccgtactttcacccgtcaaccgggcggaacagtaccggatttcacccacggaggaagaccgctacaacctcgtgctggaggagggcatcccctcgcaggagctgctcgaccgggcgatcagcctttatcagacttcgtcggcgtggaatacccggccgtagatagtcgaaagcgggaacctgcatgatttttgggttgttttattttggaagtccgcaaaattgtcctatatttgcaccactctttgagaaaaaagagggtttggagagttgggtgagtggctgaaaccaccagtttgctaaactgacgtacgggattactgtaccgggggttcgaatcccccactctccgcaaattaagattttacaaataaaaaaggttacgacagatgcgtaacctttttatttttccagagcgtctgcaagcgagttcccgcactccggaaaagtgaaaaagtatccgtgtaaagagcggattccgtttattcatcgactttgcagggactcttccattatgggaaggacgagcggcacgtggtaacacgaagtcaatccccttctctccgcagaacaaaagatacccggatggaccgggaaaacgataaaacaggattgagtttactccgaccctatttttttattcgaacaacgacgtaaagttatcttctcaaccggtgcaaaaagcccacgcacgccaacggaaaaaaaatcaaatccgatcgttgtcattcatctcccggccatagcggattgcctgcgcccggatcctctattcgaagatactttcgctaccttccgataaaatcgggaaatagggtttccaatacaaacgcaggctattcaaccgaaaaacagagggataacctcaacaaaccagatcggataattacacagaccgttccaaaaccaggcttgtcaggcgaaatagcggagacagaagccaatagaacaaaaaacccattggattgcatattaagacacaacaaatgcgtttttcagtcgtaaaagcttgaaatatagacttttttccgggggggggaattgcgcttttttgtttggttattacgcgaataaactctacttttgtaatcggaaatgacctgccaggcaagacaggcttctgtttccagaggttcggtgtcgtttctgggtcagaaacagagatcccgggtgccgaaaacagaatcgcacacgattcgttctgcggccaacctttagttgctgcgcggtggaaatcacacaaaaaccgcgggggattgtggagtatgcccttttcacaaatacggtacatacttttagcacaccgctcctccgagaaaacagacacagggcagcgaatcgatacgccaccgaatcctctcccgacctcgaaagatctgcaagagagttctacggtcggattcggcaagaccggaacaccggtctgctgccgcaggcggaaaggtatcggacctgtaaacaagatcggcagacaaagggcgcacccggagcgctgcaattacgatttcgggacattcggcgggacctaacaccgccttcaaactatgtcagacaaaaacggcgaagagtgctggtatgcactgaaagtattttataatcgggtattcgaactcgaaaaacagctcgcgcaagagggggtgaggagttatattcccctgctccgggaggagatagcgacaggatccaaaatagtgcgaaagcgcaagccggccgtttcatccctgatgttcatccgccaaagcgagcactacctgctcgaattacagaaccgattgaaagcgagttgtccgttcatggcctacttcgaccgcgaaacgaaaaagccggccgccattccggaccgggaaatggagctgttcatgcagattacctccgccgacacgcccgacctggagtatttcagcgacgaagcgatcgactaccgttcgggtgacaaggttcgcgtcacgggcggcccgttcaagggagccgagggatacatcaaacggatccggggcaaccgccgcctgatcgtcgctctggaaggcgtcattgccgtagcgacgacctacattccgggacgtttcctggaaaaaatgcccgaaaactgaccttcgcgcctcgaacaatgaaagttgcacggtaattgtcggaaaacgggacagcggtcctgcgggtcttaaacccgacgccctgttccgttccgaatacagcccgcttcgaaaatcgacagattacaacatacacgacaagagctgacgaacaatcagtcctttgcaaaatatttattctaacgaaccatgtaccgtctgatagaaaaattgcacttggaacgctatctgaactccagattgatccttgccatcgacctggtcgtatcgggggtagcttcgctatgcgcactggtgttggtgagattgctgcttcctcccctctccaacatttcgaaattcgccctgttatggattggctgcgcggtcgtatattcgttcatcacctttttcctgctcaagacctatcggtcggtcatccgccactccacgttgcgggaaatcgcaaaattcgtcgtggcggtcatcggcaaggaactcctgttgggactgaccattctgctctacccgcctacaccgctgttcggtatgcatatgctggctctgctgctgttcgatctgctgctgaccctttgcggcctgatcctgatccgggtagcgatgattatcgtgtacgacctggtcaaaaacaacctgaaatcccgctaacagcaccagttggtgttggtttacggattaagcgaaaaatcggtatcgctggtcacccgcttgcaaagttctccgcattacaaggtcgtagggttcctgactttcggccggagaatgaaaaaccacaccatcgcggagtgtccggtctattatttcgaaaatgaatacagcattcgatacctccggcaacgatacgacatcgatgccgtgctgttccccaccaacgaagaggcacaggccgagcaggagcgcctgatccgctactgcgtcgaaagcaatctgaaaatcctgatcgcaccgcctatcgacgaagtcatcgacggcaagatcatgcggcagtctatccgcgaaatcaagatcgaagacctgctgggccgccccgaaatcaagatctcactggacgaaatcatcgccaatttccgggaaaaaaccgtcatggtcaccggagccgccggttcgatcggctcggaactgtgccgccaactggcatcgttcggaatcgagaaattgatcctgttcgacaatgcagaaaccccgatgcacaacctgcggctcgaactcgaagagcgcttcccgaagctggaattcgtccccgtgatcggcgacatccggctgcccaaccgcctggatttcgccttccgcacgttccatccccaggtcgtattccacgccgccgcttacaaacacgtccccctgatggaggaaaatccctgcgaagcggtgctggtcaatgtcatcggcacacgcaacgtcgctctgaaatgcctggaatacaacgtcgaaaagatggtgatgatctcgaccgacaaagccgtgaatcccaccaatatcatgggctgtaccaaacgcctggccgaaatttacgtacagtcgctcgggctggccatcgaacagggtacgatcgagggggccacgaagttcgtaaccacccgtttcggaaacgtcctcggctcgaacggctcggtaattccgcgtttccgcgagcagatcgccaagggcggaccggtaacggtcacccatccggacatcacccgtttcttcatgaccattcccgaggcctgccagttggtcatggaggccgcaacgatctccacaggcaatcagatctgcgttttcgatatgggtaaatcggtgaaaatcgccgacctggccaaacgcatgatcgaactggccggatacgaacccggcgaagagatcaagatcgaatacacgggattgcgtccgggtgaaaaactgtatgaggaggtactctcgaacaccgaaaatacgatccccacgacacacgaccggatccgtatcgccaaagtgcgcgaatacgactacgccgaagcctgcgctgcgaccgaacagctcgaacaattcgccaggatggtaaacgtcccggacacggtttgcctgatgaaaaagatcgttccggaattcaaatcgaaaaactccgaattcgaacagttcgacaaagtgcagcccgcataaaacagaaatcaccactatccccgataaccaaccatgaaaggaatcgttctggccggaggctccggcacccgtttatacccgatcaccaaaggagtcagcaaacaactgctgccgatctacgacaagccgatggtttactaccccatctccgtcctgatgctggccggaatacgcgatattctcatcatctccacgccggccgaccttccggctttccggcgtctgctgggcgacggatcggattacggcgttcggttcgaatacgccgaacagccttcgcccgacggactggcccaggcgttcctgatcggcgagaagttcatcggcagcgattccgcctgcctggtgctgggcgacaacatcttccacggctcgggcttctcgacgatgctccgggaagcggtccgaacggccgaagaggagaacaaggccaccgtattcggctactgggtcgatgatccggagcgttacggcgtggcggaattcgacggaaacggcaactgcctttcgatcgaggaaaagccggccaatcccaaatccaactatgctgtagtgggactctacttctatcccaacaaagtggtcgatgtggctaaaaagatcaaaccttcggcccgaggcgaactggaaatcacgactgtaaatcaagtctttctgcaagacagccaactgaaagtccaaaccctcggacgcggcttcgcatggctcgatacgggcacgcacgactcgctggcccaggcctcgattttcgtcgaggtgatcgaaaagcgtcaggggctgaagatcgcttgtctggaaggcatcgcctaccgcatgggctggatctcggaggagaagatgcgagcgctggcacagccgatgattaaaaaccaatacggacaatatctgctcaaagtaatcgacgaattaaaacgcgaacagaaataatgaaagtcattgccaccgcaatcaaggacgtggttatcatcgagccgcaggtgttcggcgacgaccgcggctatttcttcgaaagctactcccagcaacagttcgaccaggccgtccggcccgtacacttcgtgcaggacaacgaatccaaatcccgccggggcgtactgcgcggactccatttccaaaagggggccgcagcccaatccaaactggtgcgggtcgttcagggtcgggttctggacgtcgccgtcgatatacggcgcggatcgcccacgttcggcaaacacgtcgcagtcgagctgaccgccgagaatcaccgccagctcttcgtaccgcgcggattcgcacacggtttttccgtattgagcgacgaggccgtcttccaatacaaatgcgataacttctacgcgccccagtccgaaggagcgattgcctggaacgaccccgacctggggatcgactggcaactccccgcagaagaggcgatcctctcgcccaaagaccgggcacatccccgcctcaaagatgccgacgaacttttcgactatggaatcgactactatgcataacatactcgtaaccggtgccgacggacagttgggccgcgaaatgcgcacgctcggcgcagcttcgcggcaccgctatttctttaccgacgtcgccgacctggacatcaccgatgcgaacgccgtacgacggttcgtcgaaaacgagcggatcgacgcgatcgtcaattgtgccgcctacaccaatgtagataaagcggaagaggaggccgaaacggccgaccgaatcaaccacgaagccgtgcggaacctggccgaagccgccaaagcgtgcggcgccacgctgtttcacatctcgaccgactatgtgttcggcggcatgggaaatattcccttccgagaggaggatccgaccgcaccgctgggcgtgtacggcaaaaccaagctcgcaggagaagaggcgatcgtggcttcgggatgcaaacacctggttttccgcaccgcctggctctattcgccctacggcagaaatttcctgaaaaccatgttgcagctcacggccgacaaaccggaattacaggtcgttttcgatcaggtgggaactccgacctgcgccgccgacctggcccgcgtgatcttcgaccgcatcgaatccggcgactatgccggacgggagggcttctaccacttctcgaacgaaggagtctgctcctggtacgatttcgcccatgaaatcgccgcgctggcaggccatacctcctgtaagatccgtccctgccactctgcggaatttccgtccaaggtgcaacgaccgaactattcggtactcgacaagaccaaaatcaaaacgacattcggaatcgacatcccccactggcgggattcgctcgtacgctgtatggcaaccctccggtaagccgaagcgaaccgccgggatcatcccgaacaacgagaaataaaaacagaaaaagcaaatacatgaaacgcaacatcctcattaccggcggcgccggattcatcggctcgcatgtggtgcggctcttcgtaaacaaatatcccgactatcggatcgtcaatctcgataaactgacctatgccggcaatctggccaacctgcgagacatcgaaaatgctccgaactacaccttcgtcaaggccgacatctgcgactacgacaccatccgcgaagtgttctgcaagtacgatatcgacggagtgatccacctggccgccgaaagccacgtcgatcgttcgatcaaggatccgttcatcttcgcccgcaccaatgtcatgggcacgctttccctgttgcaggcagccaaggaacaatggaacggcaactgggaggggaaacgcttctatcatatttcgaccgacgaagtatatggtgcgctgcaattcgacggcacgctcttcacagaggaaacccgctacgatccccactccccctattcggcggccaaagcctcgtccgaccatttcgtgcgggcctaccacgacacctacggtctgccgacgatcgtaaccaactgctcgaacaactacgggccctatcaatttcccgaaaagctgatcccgctgttcatcaacaacatccgccacggccggccgctgcctgtctatggcaagggcgagaatgtccgcgactggctctacgtcgaagaccacgcccgcgccatcgacctgatcttccacaaaggccgcatcgccgaaacctacaatatcggcggattcaacgaatggaagaacatcgacctgattaaagtcatcgtccgcaccgtcgatcggctgctgggcaaccccgaaggcgagagcgagaagctcatcacctacgtcaccgaccgtgcggggcacgacctgcggtatgccatcgattcgcgcaaactgaaaaacgagctgggctgggaaccctcgctgcaattcgaagagggcatcgaaaaaaccgtgcgctggtacctcgaaaaccaggagtggatggaccatatcacctcgggcgaatacgagaaatactacgaatccatgtataaaaaccggtagtaagcccggcagtgcatgattctgacacacaagacaacccccttttgcaaacatcaataaatctaaaaaacaaaatcaatgaatatagcaatcgtcggcacaggctacgtgggtctcgtatcgggagcctgctttgccgaaatgggaatcgatgttacctgcgtggacatcaacccggaaaaaatcaagtgcttgttaaacggtgaaatccctatctatgaaccgggactggacgacctggtaaaacggaacgtcgaagcgggccggctccatttcaccacggacctgaccacctgcctcgacaacgtcgaagtcgttttctcggccgtaggcacgccgccggacgaagacggttcggccgacctgcaatacgtactcgaagtagctcggacattcggccggaacatcaaaaaatacacgattctggtcaccaagtccaccgtaccggtaggtacggcaaaaaaagtcaaggccgtcatcgaggaagagctgaccaaacgcggcgagcaaatcgatttcgaagtggcttcgaaccccgaatttctcaaggaaggcgcagcgatcaaggacttcatgtcgcccgatcgtgtggtcgtcggcatagagagcgaccgggcaaaaaaggtcatggaacggctttaccgtccgttccaaatgaacaactaccggctctacttcatggacattccctcggccgagatgaccaaatacgcagccaatgccatgctggccacacgcatctccttcatgaacgacatcgccaatctgtgcgacctggtcggagccaacgtggacatggtgcgcaaaggtatcggcgcagacacccgcatcggttcgaaatttctctatccgggatgcggatacggcggctcctgcttcccgaaagacgtgaaagccctggcccgtaccgcccgcgaatacggctatacgatgggagtgatcgaagcggtcgaagcggtcaacgaacgccagaaagagatcgtagtcaagaaactgcaagataagctcggaacactccggggcaagacgatcgccttgtggggcctggccttcaaacccgaaacagatgatatgcgcgaagcaccggctctggtcgttatcgaaaagctgctcgaagcgggagcctccgtgaaggtatatgacccggtagcgatggacgaatgccgccgccgaatcggggaccgggtcgtctattgcaaagatatgtacgatgtggtgatcgacgccgacgctctggcggtattgaccgaatggaaggagttccgaattccctcctggtcggtcatcaaacgggttatgaaacaatcggtattggtggacgggcgcaacatttacagcaaggacgaagtgattgccgaaggattcgagtacgcggcgatcggcaaatagctttcgaacgacgagaagtcacaatccgttttttcgaaatttcggcctcctgtaccgtaaaatatagaaggtcgatttttgaacatacagcctaaaaccgaaaatcgtaaggccggtaaaaaattcgaaaaccatgaaaatattagtgaccggttctgccggattcatcggctaccacctatccaaacgattgctcgaagcgggcaatcaggtcgtcggcatagattctatcaatgactattacgatgtccggctcaaatacgcccggctcgaaacggcaggcattcaccggaatctcgttgcgaaaggacaaccggtgcagagcgatcgttatcccgcttacaggttcatccaaatgcacctcgaagaccgacaggccctgcaaaacctgttcggaactgaaaaattcgatgccgtcgtcaatctggcggcacaggccggcgtacgctattcgatcgaaaacccctatgcctacatcgacagcaacatcgtgggattcctcaacctgctcgagtgcgtgcgacacaatccggtccggcatttcgtttacgcctcctcgagttcggtttacggcggcaatacgaaaacacccttttcggaggaagaccgggtagataaccccgtatccctctatgctgccacgaaaaaatcgaacgaactgatggcgcacgtctattccggattgtacggaattccgaccaccggtttacggtttttcacggtatatggcccctggggacgtcccgatatggcccccatgctattcgccggagccatccgggaggggcgaccgatcaaagtattcaatcacggcaatctttcacgcgacttcacctatatagacgacatcatcgaagggatggtccgcgtcatcggcaaagccccggccccgacacaagaccgtcctattccggccgaagtctataacatcggatgcggacatcccgttcaactgatggatttcatccatacgctcgaacaggccctcggcaagaacgcccaactgcaaatgatgcccatgcaacagggagatgtatacacgacctacgccgacacgacaaaactcgaacgcgatttcggctatcggccgcaggtttctctggcggaagggatcgctattttcgcccaatggtacgaaaaacaacaaacgacaggcaacaatgattaactcccgaaaagatctcgaaaattacattcgagccgaccggcagcgcaatatcggatcgatcggctttctgaaatacaggctcggactattcatgaaatcggagtcctgtattgccttccattatctgaccgcattgagacattgcgaatattaccacaatacacgagcgaatctttggcaccggctactggcctgctattggaaaatccgactttcccgtcgcggaggtaaataccaaatcgcaatcggcctgaatatggtcggccccggcctgcgcatcccgcattcaagggggggggagtgatagtaaattgtctgtcaatgggatgtaattgccagataaacagcggtgtcgtcatcggattaaataagacgccggacaaccgccctatcatcggcaacaacgtattattaagtcccggtgtcaagataaccggaaaatgtaaaataggcgacaatgtagccatacagcccaactccgtcgtattccgggatattcccgataattgcatctgcagcggtattcccgctcagatcatcaaaagacgcagcgatagttcccaatcggttccatgaaattcacgaaacagacaaaacaagtcgtcatactctatgcctcgaccctgtcgggcgttctattgggcgtcgtcgcctcgataatcaacacccgatttttatctccggcagattatggcgacgtgagatacgtacaaaacatcatcaatttcatcgcttcgctgctgctattcgggtatttcctgtccggcagtcgattgttggcattgagtaataatgaattgcggtcccgcacaatccggggaacaatgctactcatactcatcatggcttgtgtcgtattgagcctttccatgttagtatgttattttgcccatagtcctgctaatcccgccatagcacaactatttttaatttcgattcccgtatgttactaccctctacttctcaactatatcaataccgtttcacaaggagacaaccacataggacgtttatcaatagcacgcttgttaccgacactcctgtatattcttacagccgtctttgtttatcagcaatggggagctgattcggaatcggtgatatctattcaatggggaatctattctgcagtacttttaattatcatcctctccgctcatcctaagatatccaacgtaaaacacatatttacagaactcaatgacgaaaatcataaatacggactacaattatacataggatcattatttatggtagcatccaattacctggcaggaatcacattaggagtgttcaacgaagacaatactgaagttgggttctacactttagcactgaccgtaactacaccactatcaactcttcctgccatcattggcaccacctatttcaaacaatttgcaacacaaccacgtattccctccaaagttctcaaaaattccattctgcttactgtcggtacttgtatcctgtttatcttactcatcaaaccgctaatagcattcctttattccgaagaataccatagcgtcggtaattatgcagtatggttagcggcaggattcagtatccatggattcggagatatgatcaatcgctatctgggttctcatggacaaggtaaagccattcgaaacagcagcattgccaatggagtattcaaaatattcggctatacgacatttgtctatctctttaataccgaaggggcattattaactaatgtattatgctccataatatactgtaccacattgatctattactaccaaaaatttatctctgttcaaaatggataaatacaactatgtgatattgggatcagattgggatctgtataaattttcgtattctgatctctatcaattcaacaacgtacagtacattccagggccatatccccctatcaactcattaaaagggttattatataggattcattttaaccccacaatcaaccgtttggtcaaattaccgttcaaaacagcttggaacgattcttatttcaaacataggtttccagtttcaaaaccgttctgtttcatcgtatttatgaattggatcaaacaggacgtaggtattacaacatacttaagagaaaaatttcccaatgcaaaactcgtatgcattttacaagatctggcaagcactcatccattctattgcaacaatttaaagaagcaattcgacttggttctgtccttcgatccaggagattgtgcaacatacggattcatctatcacccattggtgtactcatcctatcacggaaaaataaaaaaaatgccctatagcgacgtctatatgttggccaaagccaaaaatagattaaatgatattttcaaaatatacacaattctcaaagacaacaacttaaaacccaatctgctattagccggcgtcgatattcaggaccagaaatataaggatgaaataacttatttaaatagggatagtcatttaattccttcaatttgaattaaccagcagactttcccttatttttccgatcatactcatcgtttttctgtagctaagatatgaaatttttatcacattgacaatcaatttgttataattttaagcctatttcgcgactgtccctaatttaagcccctctgtaaaaggagtacaaaacacgatgaataagttgaatgttctgaacgtttcggatgcgaataaattcgcgtttattaaaggtaatcgtcctaccgacgaaaaagcaattaaagtaaaaaaggattctatttccgagcatgggatattgtgtcccattacggcggtgaacggtgaagaggtcataaaatcaaacggtcatctgaccgatttggacggcaacgatattgccgatgaacatgcaaaggattattacgctgttttggacggtcagcaccgtctgaaagcctaccttgaattaggcttgccgcttgaagatttagtagtcattgaaccgctgaataaaaagattgccattgcattactcattgccgaaatgaacatttgcacgaaaacgtggaaaggttccgactacatggcagcccccgcaatggccattaaggaaacaaatgcggcctttgattttgctatggaattgcaacgacgcaatttcccgctttcgacaatctcgctttgggcgtgtggcaacaacaaactcaaagccaaagatttggtggcaagtcttaaaacccgtgaaatgccccaatgtctgcaagaggctgacgggtggtgtgccaagagccgcaaatggtttgaagcggcaagtgaaaaattcacggctaaattcctcgctaaaaagtatttgatttcattcatccaagacggttacaatgtagccgaagatgctgcggcctacacgcttgaaatagaggagaaattaaaaaaacttgcccaatggcaggcggataaaatccaaaatgcccgcaaaacctctacgcagacacaagaacaagtaatccttgatctgttacgggaacatctttaattgttcggtcgtttagccgaaccgaaaaggggacgattgccattatagcaatcgccctcttttttcattccgttatcgggatctcgtattcttcgacgggcatagctttgaaaaattcgtcgaacgtgtagcgcaaattcatcggctgggctgaatagggattatccttgtcggttcgtaaggacggaacgataatttgtttacgctccatgtcgcctttgaacgtatcgggcaaaaggtaggttccgccgtttcggtgctttttaatcagcacgtaacgtgtcatgccgttcttaaagactatttccaaaatgccacgcatggcagagagggaatgatagacggccttttgcaatttttccttgtataaggccgactgctccatcttgctaaaatctttctgctccacgttccgttttatttcggcatcgttttcggctatctgtccgttcagttcggaaatttcctgctcggtttgcttgatttgtttgcaaagcacattataatcggtttccaattcattaataaggtcatcattattcagtttcttgattttggcaatcaacgatgccgattgcgttttcagttcatcgacgctattgacttttcgggtgattgtttcccgaatctgcttgtttatcccctgcaattcatttgcccgctgggtattgaaacgcttgtattcctcggtgtgcaaggtttcctttacacaagtccaaacggacgataggatataagcgcatttgacgccgtaattttcgcatttctgtttgtcgttataagcacttgaacaacgatagattagatagctgttgtggttgggtttcatgtaaagaccgcatccacacgggcaaaacagcaaacctttcagcggattatagtatttcggagcattgctttgaaacaggctgttttcacgcatctgtttgttggccttgtcgaaatcttcgggcgtgatgatttgcagttcgggaatttggccgtacaattttccccgtcggtatatctcccctttgtatttgggattgcggataatgcggcagatgcccgaataagagagtttgtaagggtataatttattgtaaacccttacagtctgccgtatcgtattgccgtcgattagctgctgaaaaaggtattttaccgcttcggcttctttggcatcgacgacaagcaggtttttaggcgtttggttcagtttgtaatcgggattgtgaatgactttgtagccgaaaggaaccgtaccgcctgcaaacatattgctaaactcggccagtttggagcgtaaacccgtctgcatccgacctgcaatcttgtagcgttcgtcggcacttgctttggcttctactgacagcgtaatgatgtcgtaaagggataaaatagttccagccttataaatgcggtcttgcttatccaaaaacagaatatcgacaccttgtttcaaaagttcgtttatcgttgaaagaacggataaaatatcatcttcacgcgataaacgggagagttccgacacgataatcatatcggcgaccgcatcgtccacatctaaaagttcatttagacttttcctgtcctttctggctcccgaaattttctcttgaatgattttgattagatgataatttcggtcgctacaataggccgtaataagttcaatttgacgggtaatgtcttgtgcctccgtcgaaacacgggcgtaaccgactactcttttcgatttttccataacgctgtcaatcaatctttagcgcaaatttaacgttttttttgttaatctgcgacaaaattgattactatatgtacatgcgtcgtcgcccgaggagccgatctgtgcgaggtcgcccgaggagccgatctttgcgtcgtcgcccgaggagccgatctttgcgccgtagcccgaggagccgatctgtgcgtggtcgcccgaggagccgatctttgcgaggtagcccgaggagccgatctttgcgaggtagcccgaggagccgatctgtgcgccgtagcccgaggagccgatctgtgcgtcgtcgcccgaattaacattgtcggtcggaccctctttgatgcacttctcgtaaatgaaatctataccagctttaatgaatcctttgaaatcgagttttgccccgatgtgaatctttgtcgtcgccgttttatccgagtcggaatgacatcgccccaaagctgttacatgatgcacagggatgaacttgcattcatcatccagcatatcacgatagctaaggacagagaacggtgattcgcagaaatgaaagcctcgattacaaactttcaactcaacatcctcttcgtaagtcttgccctcctcgaatttgaagcccaggcaggtcatatctgcattgaaccctttaaatccatcgatatgtttttcttcgccgaactcttgcggaagcaccacgttatcgccgaacgagacgcttttgaatacttccacaatctcttcgaccgagaatccagcgatgccgcatccgatcttggttacatagaaaaccttatcggtattgtaccgtgtatagtctgcgaatctccgtaccgatcgcgtcaattcctcggtagacaccttgtccatctgttcatcgagcgtagggatagcgtaggactggccctgtaagccctcgccgtgccccatgatcgcgccgaacttctcgaccgcgacacgagctgcgccgccaacgtggttaccggccttattactgccgaatacaaagacctcgttctgttttaatttggaaatgttctctggggtaaatactttgtttgacattgcacgtaaattgttttgattaaaatttgcaccctgtcgtcatcgaagaccacgactgaatcgcagggtatatcgctaccggctccccgaattgctccggatcgtcgcctgctttttggtattgatcggcctaatatccgcccttctgcgccaagtcgctcgccgggttttacatcccttcggatggttctcgtatttcaatgaaccgcttattcgttccagcctttctgccttgcggccggggtttatggcaggctttaggacccctacggcttccgtgccgtcctttggtgcccgcatcgggacattcaacccgatacggactttgaaaatccgcgcccggaaatggcaaactcaactaatctcaactcttaactaaactctgaaaaatcgggcgcggataataagttgttaattctactcccatttcagcaacgctttcttcttcttgagcgtcggaaagtcgagcgtaagaatggttttagcataaaacaacattttagcgtccgttgaatcggggtgcgtttctatcaatccccgtttagcataatcccgaactcgcgctgccgacaccccatgaaatcgagcagtttcttcaacagtcatcactacgtttttgaacacattcacatcgatgctgttgtcctccttttcttgcaactttttacgtagcttccggttctcttcttccagattaccgatatatgcagcaatatttgcggctgtcatatcgctatacgtgtcttgaatggttttatcctgcatcatagcgtcttgtcggttatttagtgctatatcgtgtcggcaatcaggccgacacaaaacaagagtatccgagaatctcaaatttttataattcgttcaatgcacacccactgttcttcgagcagggcagccagcctgtctgccgattccattattcagttctccggagaatatgtctttgctaaaaacagcccttccaccggaacctggaacatctcggcaagaatggcctgccgtcttttgctcggcctgcgatacccgcctttctccggatctgttatccacgactgaatcgtccacatactcactcctaatcgttccatgatctcattcgcccgacggctctgctccgaaggcgcgagggagtgccatatctccccgaatgtctgattgctcttcttcgtctccatcatattgttatccttaatctccgaaatactgtcccggccgcgcatcggcataatagtccaggcatcccgccgcgaaagctatttttgctgcggcactatgttctccggccgcttcaggcacggaggcctcctccggagtgcgcccttcgatcatcgcgcggatgttggccagcttctcgttattccatgctttccgcaaggcctcggcgaaatttttcaccatcttcacccgaaacatataccaggcattcagcatgatcttcgatttgttatagacagctttcataatcaatattattttgtatatttgtgttgtagtattgtttgacaatgcaaatataaagactatttcttgaatacacaaacattttcaagaatattttttgtataaaaatgtagagagtatttatatgaatgattttcaaagaattgaaaatgtattaagtcacttaaaaaagagtgcaagggctttgtctatcgaattgggtctaaaaaatccacaggtattttacgatattaaggcaggaaaatgcggaatatcaaaagacctcgcattgaaacttcaagacaaatactttataaatgccgcatggctcctcaccggcgacggcgagatgcttcgagaaagccacagcacatctccggtcggcaatgctgccaccagtgctgacaagagtgaaatgcagcaaacgcagggttctcccgcgcctacaaccgagaatattactaatcttatagcgatcactcgtgaggcgatggcagtcataagagagcagagtgcccagatgaatcggttaattacacaagtcgagctgtcgaatgcccgttacgataggctgtttgcgtcgatttcaggcgtttctacaggctttccagcaactccgacagatctgggggtcaaaaatcccccccccataaaatcggagctaaaataatgtatatcaatgaattacaaaaatatattgtaattcagacacctgataataagcattcaaagaagagaacgattaaccgacaaatcgggaaagagcgatcgaaacggctccggcggtcttctgcaaaatcggcgggaactccgaacaaaaatcgccggaattcccgcaagttgttcaaacatcggtccggttgcttttgaaacggctgattcgaagtcgttcttttctatccagcgctttttggacggacgggtatttcaccctgaatttggcaaacgtgtcccgcgaaagaccgaaatgcctgcaaatatcgccgatggactttccccggtcgagcattgcgataacggtttgccgattttcaatcaatacgttcagtttggtataactcccataacgacgtcccaaaaccatcccctcggcacgccgcagtgccagcgcctcgcgcgtccgcatcgaaataagattgcgctcgatctccgcgacgagtccgaaagcaaaacatagcaccttgctgttgatcgtattgtcgaacgaatagccctccttggtcgtataaaggttgattccccgttccaggcatttgcccataatcgccataatgtccgtaagcgttcggctcaggcgcgaaatctccgtaacgatcaacgtatcgtttttcttaagacggcgtaacagtgcaccgagtttgcgatcacgctcgctcttcttaccgctgacgacttccgtcacccaatgatccacgacgagattcctgctttcggcgaaacgccggatctcatcctgctggttggcaagatgctgttttcccgtgctgacacgtaaataacctattatcataatacaaatgattttaaccgaggcaacgtcgcctcggtcggtaaaggtaagcgtatgcttcgggagcaccggaatacaaaaccttccggcataaacagtccggaccggccgcaaagcccggaaaacgaataataaattagaaccctacatccgatttactccggatatgtttcgggttccgaaacctttcggtcggaacggtcgttattctccgccaaagggaacatttacgattgcggcctctcccctccgcagaggagatttcacgtgcggcacggagctcgggaaaacgatgagcgaaaacgagtaaaccgtcaaattatgcgactgttgtaaataaacgtcccgaacgttttatcgctccgttttaatcccgcgattttcgtatccggccagggaaaaacggttggtttacgaccgagccgcaagtcgttccataggatgatgtcgtctgccgcatggattccgccgctccgtcttttcgatcggaacagactgagagatttcttgccgcagccccaagcactttaataccgaaccacccgttccctatgctgtcgggcaaaccgccacaaaagaccgaaagcaagccattaaaagccaaagtccggaagagcgttacgataacgattcgctcttccgaactttggtttgtcgtgcagttaagtcgcctcttcaccttcggagcccctgtcaatccgctccgccgtgccgaagaaatagtgcaagacccacaggaaaaataatccttcgagaaacagccgactccgagaacgaaatatccccgtacccttttgcagggtacggggatatttcgttctcggcaccgcccgcccacaggcaggaatatcagggtagtgccgcaatcgtttcaaaagcctctctccagacagcatttttcctgtacacctccacactgccggcaggtacataaagaattttagcaggaaggccgaaattatctttccctagctccggcggaataacggccagacaggtaacgacagccatatcaagataacttggaaaagctcctgtttcaatcaccgtcacgccatcgggaatagttacatccgtcaatttatgacactgcgaaaaagccccgccacaaatagtttgcaaactccccggcatgataacacacgttagattatgacatcgagcaaaagcgctgctcggaatagtcgttaccccctcgggaatacagacgctctgaagactttcattctcgtagaatgcccattcaccgaacctcaccatacggtcagggaaggtgatacgcttcaaactctgacaatgccagaaagcccaatctcccatacttgtcacactttccggaataacaactttcgtcacaaagctgcataacataaatgcataatctccgatgcgggtcacaccttcgccaatcgtcaaggaggaaatcctgttcacatgcggataccaaggcggagtttccgaagtacctccatctctataatcgggcataggtccctccccggtaatcgtcaggacaccatcctccgtcaaagtccatgtaagcttcccggtcgttcccccaaaaatcaccgccgccgaatcgctgccatcgcaagaagataaccctacaggaaacaacaggcaaaaacacaaagaccaaaataaaaatcttctcataagctgaaaatcattaaatccccctaaaaacagttcgtccaataaaacaattcgacataaatatataaaaaattattcaaagagcgcctattcggcaatatttgccatggtgattgattatacgatttagtgtatcccccaggatttatcaggatttagttcgtcatcgcctcatttttttacagcgacaatcacgccccaagctccataatatcgtcctactaatctctttatcaacgatgtacttcgtcatagcatacaataaccacaaaatacatccgtagcaaacatgctcgatcatcatcggtggtcgctgctctatgccctgctcctccttatcctttatatgaaaatcgatttttacaaagacttttaacccaaagcgttatgtgacaaaggcaatgacgggccgacggtcgccggcacaattcgtatgtttttcaacttcccaaaacaccttccctaccgggaccgaaagagatttcagaccagaactgatcaacacgtccacgacacaccaacggattctctctcccgcaccacacaaacctcaatcgcgaatacacacgaaccgcgatctatcgcctacataaatttaacgcttttaatacgggtgtcccgcccggcgatttcacgttcgacgaggcccgtcaccacatctgcggcatcgtgccagcggttagcacggaatttccagcggtaagtggtcagatgggcatacaattcgggccagcgcagcgcccagtcgcagggaaaacgtaccgtatgaaccaccgtcgctgcgttcgagaggatgcgggcttccttgttagcggactggtgaaaccactccacacgaacctgcggcgctaaagcctgcaccgcgcgggcaaatccccggcctccgttgttactctcgatcagtgccgcacgcgtacccgactcgcggagcatcgttcccaccagtccttcggtcatctccatcggttcgcgcgaataaaccgcatcggtaacgtagatcaccccgtccggatcgacgacataacagagcgaacagaggtaatcgtcgcccgtatcggccgtatcggtatagttcgcccggcgcacgatgtcgcggggcagctcctcgtaagtcaggaaattatccccgtagagcagcccttcgcgcaccgaaggacgcccctgatacatacactcgaaccgcacgggatcgagccgccgcttaccacgcagcaattccgcgccgtgaagctcctcccagagcgcttcgcccggttcacggggatcgaccggcgacggaggacgcgttttgagagcttcgaagttcaaatagagccaggtatcgggcggcagcgtatcgagctgcgcccagtcggtgaactcgacgaaaggctcccggcggcagagcgtgccgatcaaatcctcctcgtgccagcgcgtgaagacgatcaactcgccggagaagttgtgcatacgggtcttcacgaccgaggtgtaccactcccaacagttctcccgcacgacgggcgaattggcctccatcgcatctttgtacatatagtaatcaattttgtcgcagattaacaaaaaaaacgttaaatttgcgctaaagattgattgacagcgttattaattataattttctctgtttgtcaccctgtgggtttataccccgcattattcgtttgtggtgttcagtggaacgattaaataggatggacgttgggataacgtcccggtttattgttggttaatagtgtttaatcgatgataattgaatgtcgaatgaagaaaatcctattcttttttttgctgccgtattagccgcaggaggcgtggaggcgcaggaagcggcggattccatgaaaattttttatcgccgtgggtatcgtaatgtcgatctgtcgtttcgggacaatcgggcgcagatggagcgtttcctgaatctcacggaggcggcactgaaaaacgaccgggtcgaaaaggtcgttatccgctcgtatgcttcgccggacggaacggcagaagccaacgaacgactgtcggtcggacgggcggaagagttgaaggcctatctggtccgcgagggaaacatacctgcatctttgatcgaatatcacgccgaaggcatcgcgtggggaatgctgcgggaacaggtcgcggcttccgatatggcgggacgcgacgaagtgttggatattctcgaccatacgccgctgtggatttacgacgacgataatcggattgtcgatggccggaaaaagcaactgatggatttgcagggcggaaaaccgtataattatatgttggagcactttttccccgaacttcgcaacagcgtcagtactgtgctctatctgcatatcgtggcgcagcagaatagcgaaacggagccggagccgattgcggtcgttccctccgaagaggagcgggcgccgcagcaggagccggtgtgggtgcctgccgacgcggcggcgatgccttgtgaaacgacggtccctgcgacggttcctgcaaagccgcgtcgctcgtatccggcgaatatgatcggggtacatgcgggatattgcacttcgtggatcacttcttacggcttgacctcatcgacgaggccgggttacgaggtgggtgtcagcgatcggattcggttgggccggcaatttccgttctatctgcggacgggattgacctttataagcaaagggtacgaggtccgtggcttcgacgatagccgtactacgatgaactacctgcaaattcctgtgggtatcgattataccgtcgccctgggcgaacgctttgccctgattccgcacgccggattctattatgcggtcggtgtcggcgggaagcgcaaggtcggtgccgaggagatcccggttttcggagaaaaaggcgggttttcgcgtcacgacatgggcttttcgtgtggagccgatattatgttcggtcggttcgggatcggggtcgcttaccagatcggcctgatcaacatcgacaaaaccgatacgatgtacgggaacgacagccagatggtcggctacaagaatgtcaggaaccgcagtttcatcgtgagggcaggtgtcaatttttaatcggagaatactatgagaaagataataacttgcatgattttgggcctgctgtcgctggtttcctgtacggagtatgacgaagtggccatgtggaacaaaaacgaagatatggggtcgcggctggcagcgctggaggagctgtgcagccggctgaataccaatatcgtttcgctgcaacagattgtcgaggccctgcaaggcaacgactatgtgacgggagtagtcccggtcgtggaaaacggtgaaacggtcggttatacgatctctttcagcaaaagcggcccggtgacgatctatcacgggaaaaagggagaaaatggacagaacggtacgacccctgtaatcggtgtcgaacaggataccgacggactctattactggacgctcgacggcgaatggctcacggacgacgaagggagcaagattctggctcagggaatggccggtaagtcggcctacgaactggccgtggaaaaaggataccggggaacgctcgacgaatggctggcttcgctcaacggcagcaatggcgacgacggtaagtcggcttatgagcttgcggtggagaacggttatcaggggaccgaggaggagtggctggcctcgctcaagggcagtgccggcgatcagggcgatgacggcgtcacgccgaaactggaggtccgcgacgacggttattggtatatttcctacgacaacggccaaacgtggaataaattgggcccggctacgggcgatcccggtgaggacggcgattcgatgttcagcgacatagatgtttccgatccggattatctcgttttgacgctggccgaaaccggagcatcgatcaagctgccgtattacaaggacaaattcgaccttttgtttgtttcgggttctgaccgggtaaaggagatgtcggtatattgcggcccgggtgcgacggcggaggtggagtacgaattgacgaatcctctgaacgtgcaggtcgccatcgagtgcatttcgcacagcggatacgaggttgccgtggacaagtcggctaaaaagatcacggtttccgcaccggacgatccggctgcgatcaccgatcccgagagcgaaattctggtgttcgcttcggacgacgaaaggaccgtcatgcgtaaattggtcgtcaaacaggtgaagtatatcgactatagggctacccggcaactggattgggagaagagttccgtcaatccgcgtttctggggcgaagattgtaaattcctcgacgaacagagtacgtatgattccgctaccggtgaagggcggtgggcttatacgggtaccgtgatctatattacggatgccgctttttcgggagaggcggggctgcaggaaatcgttattcctgcgagcgttgtcgaggtgggacgcaatctgtggaatgaaaccggcggcggaggtgcttttcagaattgcacggccctgaccagcgtggtattcgagggggacaacctgtccaagatcaatctgaatactttcaacggatgttcggcactgtcttccatcgagcttccggaaagcctggaaaagatcgagtataatgcgttcgacgattgcagcgccctgaaaagtatcgtcattccggacaaggtaacctatatcggcgaaggggccttcaattattgtacgggtttgcaggaggcttatatcggcgatggagttaccgagattgccgcgaaagcgtttgcggaatgcaccgcattgaaaacggtcgttatcggaaagagtattcagcgtatcggcgatcaggccttcaatacgaggagttcctgggatcagatgaccctggagaagattaccgttttgttcgacgatattgcgtccggctctttcccggtgttggagagcggttcgagaggcgtcttcccgaaacccggcggttgggatctggtttcctataaaatatatgtaccgaaagggacgaaagccgaatatcagaagaactggtcggattatagttcgctgatcgtggagatgcaatagggtgcgggccgtttcgactggtcgtacggaatgcggcgacttttcgaaggttgaattttcaatattttcgacttaagtccgaaatcggtctgtattgacactcctcggctcaatagccgagggggggggtttgtcggatggcatttcttcgtttcccgctccctttttgcggacgatcgaggaagcgggcgggataattccgattgccgcaacaagtatggcgattatattgggttcgggtttcagacttgtttcccgaggctgtttgtcatcgttcgccgggggcgtgttctgggctgtccctttcttttgcctccttgtggaaaggggcttgggagggaaatgcttgtcggaaatcggccggtacggtacgtgatggctgcctgtattttgagcgtggagcggagggttgtgaagactgtttgtcgcctgttttgccggggtttcggtaaaatggcccgtgtttatgagcttcttcttctgcggcggtcgcttggacgctatcggggaaagtccggttattcggcgatgacgcccgatccgaccagctcatcgccatcgtaccaggctgcgaactgtcccggcgtgattccacgctgaggttcgtcgaaaagcaggtaggccgcgtccggacggatgaagagttccgctccttgcagcggctggcggtagcggatacggacatcgaaacgacggctttcgcccgttttcaattcccggagcgggtcgatccagtgcagctcgccgggagcgatccgcaaggcccggcggtaaagtcccggatggttgtcgccctcgccgacgtagatcacgttctgctccacgtcggttgccagtacgaaaagcgactccttgcggccgccgatccccagccctttgcgttggccgatggtataaaagtgggctccgttatgctgcccgatttttttgccgtcgcgcacggtataacggtagggagcagcgagtgcagccagttcggtatccgtcggagtggaggaccgctttgcggcggttgccgtcggagctgtcgccgggttcggacattctgtcgagtccgtattcgccggatttataccgcgtagggtggcacttttatccgaagccgttcgttccgccgtgcccatccctgcatcctccgttttgccgacgagtgggacggcttgtccgtatttgggccaatcggctttgatttcgtggacgttgccggtttttgctttgagcttttgttgaagaaagaccggcagatcgaccttgccgacgaaacagatgccttgcgaatccttgcgtttggccgtagcgagcttcatttgctcggcgatgcgtcgcacttcgggtttgagcaggtggccgaccggaaacagcgcccgggaaagctgttcctgtgaaagttggcagagaaagtagctctggtccttgttgggatcgctacccgcaagcaatttgtagatcgtccggccgtcgggcgccgtctcttcggccttgcgacagtagtgtcccgtagccacgaaatcggctcccagcttgagggcttccttcagaaaaacgtcgaacttgatttcgcggttgcagagcacgtcgggattgggtgtgcgccctttcgcgtattcggagaacatatagtccaccacccggcgacggtactggtccgagagatcgaccgtatggaacggaatgtcgagccgtcgggcgacaagttcggcgaagagccggtcgtcgtgccaggggcagtcgccttcgagcgtgcccgtagtgtcgtgccagttgatcatgaagagtccgataacctcatgtccggcctgttggagcaggtaggccgctaccgacgaatcgacgccgccggagagtccgataactacacgtgccatactttttgcgcaaattttacttttcgaccgcaccgaaaggcgcgttttgccggaaatatccggtcacggaagcaccgggttcccaccgattctcgttacagttcgatcagtccctcgggcagtaccatcttcaccgtacggctctcgaagtcgatgcctgcgatgaactcctcgaccgccggaaccaggatccgtttgccgccgatctccacctcgaagaggggattggcctcactgtcgtagtagtccgtgatttcgcccttcaacgtcccgatccgtacccggaacccgatcaaatcttccaggtagaattcgtcgttttcgtcgtcctcgtgctcgaggtacaactcccgcccgataaactcttccgcccgacgagcggagtcgatatccgcgaatgtcgccaatgcgttggtcttgcccctccgttcgaagcggtcgcaaaaaagaggaaccgccagtgaatcgatcttcacgaacagcggttcctctgttgagaagtcatcgggaaacgtcgtgtagagattcagtaaaaccccaccttcaactccgaagagtttactcacgcgcgcaaccgacaacaacataacggttgtaactatgcctcggcaggagcttctccctctgcgggagctgctgcttcagccgattcggcagcggcagcttcggcggcctcacgtgcggcagcttcggcagcggctttcttctcggcgagagcggctgcgcgctcttccttgattttggtctcggcggccagacggctcttctcggccgatttagcgtccgacgccagtttgttggtcttgttctcgatcttggtctgcttctcgctcagccatttgttgaatttggcctcggcgtccgactcggagaatgcacctttagcgacaccgcccagcaggtgcttcttgtacattacgcctttgtaggagaggatcgcccgacaggtgtcggtgggttgtgcgcctttgagtaaccaatccagagctttctcgaagttcagatcgatcgtagcaggattcgtattgggattgtaggtacccaatttctcgatgaatttaccatcacgtggcgctctgctatctgcggcaacgatgtggtagaaagcgaaacctttcttaccgtggcgtgccagacgaattttaacagccatttgctataaaatttttaatgaaattaataaacgctacccacttttcggggctttcaagggagcaaaggtagaaacaaaaaaccgaattgccaaatctgccgggaaacaaaatggatcaatttggtaaaagatggggtgtccggccgtattcggctgctttgcagaagcggacaggtgcagtgaaggcggttgcgatcagggcggtacggtttggcgtaaccgccgatttgccgttgataaatcccgagtttggagcactcttcggatcgcacagatcgtcttcggtgaaggttaattcttcgtagtataattcgccccaggcgccgctttcatcctgtccgcaatagtagaatccgaatgtttccatttcggcggggaggaaataataaccattttcgacatttttccagccgaacaatgtgccggtttcgagatagtcgaggatctgcatatctgaaagattcagttgtgttgatcgtgcgacatgcagaaggccccatgtatggattgtttcagggcttgtcggggtaacctggaagataaatacccgatggtcgcttgcccctttgtaaatatctgggtagagtgtttccagagccgtcccgtcatagagttgccattccgcctgcacggtagcgttcatattgcgcggcaggggtttgctcgtcacgcgagcaatgaatatattatttggaaaatcattggtgtcgaggaatccataaattacatattctgttcccggaatacaatttatttgcaatatttctctatccatatataagctcggcgagtatgagttctctggggtcatatcttggataaattggcgccagtcgtcgtaagaatcgaaatacgaggcagtggtgattcccacataataccatgtatcattgaaatttggggtgacttgcacgttgaagctgcgcatttcgatatcgtacggttcgaaaatcagttcaaacctttcttcaaacggatggtcgaaccaatcatccagtttgtcgatcactccgttgccgtcaatatccaagtactcgtcgaacggtggaattgcataatccgtaatggagagttcttcataacgtcgttccaaatttctcgtaactctcgcaggtttaatccccataccgttgctccgtacggctgcgagcagggcttcgtctttgatctgtccgttcacctcgatgtctgtcgcgattttggaaacgatttccgagagttgggcaaccgttcgtccgtgttgcagcgtggcggaaatagccagcaggatggcgttgccgacacccggacgggcgatgtccatcttgtcgaagccttccggcgagggaagttcgtcttgcgggatgcagaacgatcggagcacttcctgctcggccgtccggcgtgcatccggaatggtccggccctcgttcaaaacaaggtacttgatgcggggcgtttccagcgaagtgagcaaattgacgttcgactttccttccattgcaaggtcggacagagaccgcagggtcagcggggcatcggaaagattgcctgtcacttcgttgaaatagaaaccctcggcgatgatctctacgtagcggctgtcaatatccgatgtaagttcgaacgagcccatgtcgtcgagaatctgcgtttggtaacttttaccggtcggttgcagtcgttcgttcagctcctggatagtgacgacagagccttggatgaactgccctttctgcacgcttccgttgatcgaatattccggaatgtccggtttttcatcctccgagtcgttaccgtcgccggggttctcggtgttatccgatcctccgtagggcgtttcatcgataccgctgtcggtacagccgcagacaagcagtacggcgattgcgaataaaaagagttttttcataataagattatttaataagtagaaatttgatcattcctgctacttaccgtatcggctcctgctgcggtggtttgaacaaaaaaagcgtggaactgcaatatatgttttgataacggattgggaaagtcgaaaatgaaaagaaaagcataacaagagaaaatataatcactaatatacagtgttttatgtgatatcactttcgggacacgctctttaatttgtcttaatccgctacaagttttttcgggatatatgggaacatatacgggaatttatttacctttgcaatgtgaataaaaaacgtattgccgatgaaagtttccgtctatctgaaaaagagcagttcctcgacttcgagcatctgtttccgtgtccgtgagaagaacgtggatataaaggttgtttcgcctcttgtagttcatgacaagtactgggattccgatactctcagttacaagcgcacgacagccgtacctgccgttgaacagaaactgctgcccgaacagattgcctccatcattgagaaagtggagaagacattttcggacaaggcaaacagcgcatggctgaagcagaccatcgaggatgtgctgtaccctgcacgggctttcgaacgcaaccatccgaatctgatttgccgcatccatgaatatctggaaaagtttgacggtgcggacagaaccaaagaacatattatccgcttcgagcgcaagatgatacgttaccatgaatatcaacgtgagatattaggtaataccgatttcaccctctttgttgaaaccgtcacattggagcagatgaacgttttccgggattatgtgaccaacgaatacttgttacgtcagcagtaccccgacttctatgcgtcccggctgcttatcaatcatgctccaagaccattgtcgaacacgaccatcatcaacacgatgaacctcttctgcacttttctccactggtgcaagaaaatgaagtattccgacaacgaggtatatgagctttacggatgtaaggaaccgacatacggcgatccgttctatttgacatccgaagaaaggaatgtcctgtatgatgcagatttgaacgactaccctaaactggctgtcattcgggatatattcgtgttccattgctatatcggctgccgtgtgggtgatttgtacagattgacaagagacaacatcaaggacggatttctggagtatatgccgcagaagacaaagaaatgccaggcaaaagtcgtcagagtaccgttgcatgagaaggcattgaaaatactggaacgctatgaatcaggtacagacaggctgctgccgttcaaacccatacaccagtacaatcttggcatcagggaactgttgaagcattgcggtatagacagaatggtcaccattcttgacacacacggctacaacaccgtgcagaaaccattatatgaggtagccaccagccatacggcacgcaaaacctttataggcaacctctacaaacaggttcccgaccccaatctgatagcctccatgtcgggacatgtggagggcagtcgggcattcaaccgctaccgcacgattgacgatgagatgaaacgaaacttgtggatatgataaactaaggaggacgcataatgaaagttaccgcatttataagaaagaccgccgccaagaataatgtcactgaccaggcacgagtctatttcagagtccgtgacgtgggaggcgttgacatcaaggcagcgagcgaactctccatcaaccccaaccactggagtgcggaacggcaggggtataagccccgtgtcgcattggtgtcggaagacaaacggatgggctttgaaaaggacatccaaaacattacgcaccttattgccgagaaataccatcgtggagtggacggcagctggctgaaagggctgatagaggaataccatcatcccaacatcaacttccgtggcggcaatccggcagacgagtatctgctatcttaccagatacagaagtacatggacgagacaccccttgccgcagaaagctggaagcatcaccgcgacaatctgaaaaaggtactgcgttacgagcgttttcatcaagaggtcatgcaccagcggggcttccacctttgtatagattccattaccgctgacgacatccgtgatttcaagttgtggatgcaggaagagtacaggtatgtggaaatgtatcccgtattctataaagacgagctgccccgtgatgtagcccagcaacgctccgagaacagcatgtcggggacactctaccgcatccgcaccgtcatcaaatggtgcatcaaacgggggctgacaagaaacaacccttttgaccagtaccagatagcccagcccatgtatggcgatccgttttaccttactctcgaagaaagggacaaggtctattatgccgacctgagcggcatgggggcaacctattccgtatatcgggacatattcatgttccagtgtctgataggttgccgtgtaagtgacttgaacagactgaccaaggcaaacatcgtggacggttgtgtggaatacattccgcaaaagaccaagctggaacatgccaacacagtcagagttccgcttaaccaaaaggcgttggacatattggagagatataaggacttggaagacgcattacttccccggttctcgcacttcggctataacaagaagataaaggcgattctcaagtatgtgggcattgaccgcatggtgagagtccttgacccgaagacacgcgaggatgtggcacgaccgttatatgaagtggcgaccacctatactgcacgaaagacatttatcggcaacctctacaagcaggtcaaagacccgaatctgattgcatccatgtcgggacattcggaaggaagccgtgcctttgcacgttacaggcatattgatgacgaaatcaagaaagaactggtaaacttgctggattagaatcgcctgcccgctgtattttattctttccctatgttccatttataatcaactacttgcagataacactatgactgaatcccgattgacatacgaccagttcaaggctgacattctccggtggaagaacagccatagggaagaatacaaccgcttcgcgcgtctgatggcaaacggggacgagaggcaatatctcgctatctgtcgtgccatcttcaaacaactgccaaaggtcaagatagaatgggaattgtgctggggcgatgacagtgtggaagattttgacaatataaacctgctgttcagtgaagaatccgtcccggaacagattgttgaagcattccagaagcagagggaagagaataatgcatcatacggagcttcatcgtccttttggaacaaggtcaaatccttttttagaagcaagtccaaaagacatggcattatcctttccgcaccgcttgtacttagctggctgtattacggaaagagtttcgaggcaatggtcagtatggtcaacaaacaatcagccaatcctaaagcggacagaatggacaggcagagttgttcttgggtagtcgaacggataatacaggtatccatcaagaacggcttccgaacccaggctgactgggacaaatacttttccatgaacagagccattgaaaatggaaccattggtgaatgggcgttgcaatccgcaacaaatgagaatgtaaccaacgatatgacagacgaacctgaacagcagcaacagcacacgacaaaacaagctaacacagaatactttggtgacatgccaataaacgatgccccaaaatcaagaggtcggcagaaagcaaaggaaatgccccttgtaaattatctcaactgtgccaataaagacattgtcattgatattatccgaaaattcatctcaaaatatgatacggcagcggaacaggctttaacctactatgccttgaatgaacttggactgctaacagacataggtagtgcgaaagagtatgcaactgcgctcatcattcaatttgatggcgtgggtggaattaagagcgaaagttcctatcgtcaggctatccatctgttgactacaacgcagcacgttatgaaaaacggagtgaacagaatgtgcgtaatgctaaatggtgattcctgtcagacattactttctgagcttaaagccgaacttgccgaagccgttaatagatagctccaatccacaggaaatgaagtaaaataagcccattttagtgttgtcataattgtcttttttgtcatgacaaatatgccaactcgttttatttcaattacttttaattcacctatacctttgcaccgtcaatcctttcccgagggtttggcggtgcttcacttttataagccatcggaagcggggcatcagggaacatgcagatggtcattgtaaattcctaaacaaatgattttatgattaccatagaaagtctggtcgatatgggagccaacgtgaaactggaggtaactcccacagacctcaagatgtttgccgaatcaatcatccagcgcactattatggcgcagcaggaagaacagaaagcagcgatacagcgtgaagcgaaagaaatctaccttaacacgaaacaagtccgtgagttgctgaacgtctgtgatggcacgctcaacctgtgggcgaagcgcggctatctcgtccccatcaaggtaggtaacaagaacatgtatgccaagtccgacatccgcagggtacagaccggaggcaagtctgagagtgtgacatcctattgcaaacgaaaggaaaagtgattatgggtatcagacaacaggatatatgcaacagggtgatggcacaggcgcagggcattgcggaatcggatttcccgattgacgctttccctgccaaagtgcagtgcgtcatccttggtatggtgcgccacgagaacttcaaggtggagtatcttgccgcagccatgctgtcggctgcggcttccgcgttgggcaatacctacaatatccgtgtaaaaggacattggacaaccaacgctgccctttatatcatcatggtggggcggccgggactcggcaagacaccgccgcttgaagccgtattccgtccgctccgcaaaagggactgccgggcactggagaaattcaaggctgaaatggccgcctatcagaatacaatgaaagagagcaagggcaacaacgatatggacaggcctgtattgagaagaaccatcgtgtccgatttcacgccggaagccctgatgcttgcccatcacaactgtccccgtggcataaccatacttgcggatgagattatgggcatgttcaattcagccaaccgctacaacaaggggcagttgatagagcagcttctgtccgcatggagcaatagtgccatagatgtgacccgtgtcagcaatcccattcccatacacattgagaatccgtgcatcaacatggtcggcacgacacagaccaggcgtgtgcatgagctcctcaaaaagggatacgaggataacgggctgcttgaccgcattctgttcgtgatgcccaagtcgtatctggtgccacggtggacggaaagcgaagaggaggatacagggagcaatccggcatctgcatggaggacatgggaggcaatcatggaaaaagtattctcccttgactatgaagtgaatgatgaagggaatatccctcatctgataggcatggaagcggaagcgaaaagggttttcttcaactggcacaacaatacgatcgaacgcatcaatgccataagggatgaaaaccttgtcgaatcgcgtcccatgaaaagccctgtgcaagtggcacgcctggcactgattcttcaagttctgttttacgcctgtggtgagagtcgtctgcaattcgtaacaacggctgccattgaaggtgctatccggctgaatgactatttcgaaggttcttacaggcgcatacgcgaatatgtggcaaacgatgcctgtgacgagccgtcgctggaattgctctccttgctgaaaaattcttttaccacagctgaagcccttgatgcaggaagacagctaaaagtgacggagcgcacggtgatgaactatcttaaagaacttgcaaagaataggctcatccacaaggtcaggcagggagtctatgaaaaggtatcattcacagccgagaatagaaactgcaatgtataacccctgtttgcagctttcagaatgttcagtttttcagtttcgttaaggagcaaattgccaattcctgcaaaactgaaaggactgaaaactgaaattactgcaaatccatttcagaaattatcatggacaactacagatttcatcttgaaaaatatcatcggggcaacaaggtagcgtgtcccgaatgcaagcgcaaggcttgttttacccgttatatcgatgagtcgggagagataaccttccctccccatgtcggcaaatgcgaccacgaacacagttgcggctaccattacacaccaaaggatttctttcgggaacatcccgatgaattggattcattcaggcaggagtggaaaccgcaagccgtaactccaaagaagccagtcagtcctccgtcttttatagattcggctgtcatgcagcattcactgtcacactatgacatcaacccgttgtacacattcctgtccgacacgattggcagaagcaataccgaaaggctcttcaaactttaccgggtcgggacttccaaaaaatggaacggttcggcagtattctggcaggtggattccaacggacaggtacatacaggtaagattatgggatatgacgccaagaccgggcatcggctgaaagttcctcatccgcacgtgtgttgggtgcataccgagttgcgtctgccaggcttcaacctatgccagtgtttctttggcgaacatcttcttgtccgctatcccgacaagacagtgttcattgtggaaagcgagaagacagcactcattgcagctcattttatgcctgacggcttatggctggcgaccggaggaaagaacggttgtttcaacgaaaaggccgttcgtatactggcgcatcgggatgtagtactgatgccagaccttgttgcaacggagcagtggaagcagaagacttccatgcttgctaatgtctgccggtccgtatcggtcagtacggtactggaagatatggcaaccgatgaacaacgtgccagaggattggacattgcggacttccttctgatggaggacacccctcagatgatacttcaacggatgattgaccgtaaccccggcttgcagacattgattgacgaacttgggttggaattggtggatgcagaacagatatgataattggatggattggacagctcgctgtccttgaaaaagggtttgtaaaatcccgtagtttcttagggcattttcaccgcctccgcttcgcgtccagcagtcaaaaaacccataagggagggatgtcctctcgacacccagttgcttgtggcacataggacgggattttacaataagaatcatagtaaaataacgaacagatatgagtaatacacaatacgctgtctgccacctgcaacgtggcagcggcaatgacagtggaatgtcatgccatatagaaaggaaggatgccaaaggaaagaaatatgttccggcaaatgccgatgcgaaacgaacatcacagaacagggaactgcttacgtttcctgatggagtagccaatcgcacagaagcaatccagcaccgtattaacactgccgggctgcgccgcaaagtcagcaagaaccagacaaaggcaatacgcataatgctgaccggaacacatgagcagatgatgaaaattgccaatgacggcaaactgggcagttggattgatgtcaatctcaaatggctaaaggagacctttggtgatgagaatcttgtgtcctgcgtgctgcatatggacgagaagaccccgcatctgcacgccacagtcgtgcccattgtaaccggagagcgtatccgcaggaagcgggagggcgaaaagaaatatgaaacgaagtccggaccccgtttgtcggcggacgatgtgatgcgtcgtaccaaattacatgaataccagaacagctatgccaaggccatgaaaccgttcgggttacagcgtggaattgtcggttctaccgctaagcatcaggcgaactcggaatactacaagcaacagatgaataggtatgaggaagacatagccaaattacaggctgatattgagcaagcaaaagaaggtagaagtacagtcctgtcatggtttggcaaaggtgatttggcaaaagctaagaaagaacttgcgaataaggacgagcagattgccaaactcaaaaatcagattaaaatactcatggcagaaaagtcccagttacaagaaaaacataaagcggatatagaacaattacggaatggttatcaaaaagagattgacaaggccattcatagggcagaaacggcagaacggcaattcaaggagaaggatgcaatcatagatagacagaggaaacagataagtttgcttgaccgcaaggccaatccccaacgttacagcctctcgtccggtgccgaacttgtacgtatcaatgtctcaaactatcggaatccgtcgctccacatctggacacgggtcggtgatgagctttttgagaacatcaaattccaaatagactatgatgtggcccaaagccatttcaacggccagatcacggacgaggagtttgtcaacgctgtatttgatccgcaggaacaggtaaatggaaaacaggcggaattgctgggtgccgttttcacccttgccgctggcggaccagcagaggttcatgtcggtacaggctcgggggggctcatcgtctgaccttccgtggagtgaacgaaaaaacaagcaaagttatcggaaaaaataagcctaaaaaccttttatggagtagaataggtgtaatttttcgttattctaacaatcgtatgagattcttttcctatctttgtgttcaaaatttgacaattcaaaaatagttccaacaatgagcaactcttttgtaagataccttttagaaggaaataattacccttcaaatggacaagttgtatttgactcttctgatcacattcgtttccagaacggacaagatatttccggacacaactatggttgtaatcgtcgactcgttatcaaaaaaaacatacaaggagaagaaggctatactgtaaccatgtataatcttgatggggttcatccactttggaagaacaatgttcagatggcacctaaaagaatgaaaatagttaatgtagaaggaaacattgtagaactgcgaggatatggctacgatgaaaatgcccttgcaataggtgcaccacttcaagctgcatcttttgagaactatggtgtagttgtcatgatagaggacgactctattgttcgtgcacaattaaatatgtttgacagaaacatcagtatcgtatatttacaataaaacaaatcaaatatggaattagaaagaactttcgacgagaacgtctattcgaatgtcgatgacggttctgtatttcctctctttgtgcgttattctgaaaagaacgttgatttcaataacaagaacaactcaacgagctttgaagatatggttgcacagattaagggcgtacatgagtgttgctttattcatagacggcaaaaaaatagagacggtaagctattagatgagcttgctataaaaattgatgaaattaatatctctttaacagcaaaattggctcgtgatggattttcattgattaatccagttctatctgagaagaatatcgttcttccagaggaaaacgagtattcaaagagaaaatgtgagataaaatttgtcgatcagaacgaaagtgaacttcgtctgataagtggagctggttcatattggttaaaccacacagaagagattagcaatttcctaaaagattgttttgctttaccaattcctccaattgaaattcacatagaggaggataaggaaatgtggcaagcatacttggatggtttaaatgcacttcttgacgcaaaacgagatttgataaaaatcgagaaagtcactaagcaaaagaatggtttagttcgacttgattttgacatggatagttatatccaaaactttaaggataaaatcgaagacgaacttcaagggaagtgtgaaattgagcctacagtagaattagaagatggagactgtacgatttcgtttgatagctaccaaatcattcctggcgacacaatagacgcaattaagagtataggaaaggagtactgttattctgcagaagagcaggtaacaaactatgtgcatggttcattggaagtcctttctgacccagaagagcttgcatctattgttgctgatattgagcaagaatttcataatttcggatcttcttttaataaaaaaggagataatgatttcgttgcttctacagatcgtgaaattgccatcttgaatcgaattgttgataaattgtgtaagggtattgctgaggtcagaaatacaactcaaattcaagtcggtttgcgcccatcagagagttcctttgacataaattctgtaagatccgacttgtcttttgactgcaaaatagaagctgctggcaacttctatattgttacgtctagaaagcctctcactaccaaagaacagatattttctaaactatcatttgttagttgtagagcttcgataagtccacaaagttttaatccagaaatcgtcatagattctgcaagcccaaaaggagatgcttattgttggatcctcaatgacatcgaacaagcacaacatgttggttctttgtttaatcaggtttgtaaaaactatcccgatcagcgcgtaagcagcgtatatcaatatgcttttagaccaattattgacaagatgattctggcggacttgaagtataacaattacgaaaacaagtctatctttgttgatgtaccaagatcaagcattgttttgtatcctaagacagaagaggaatacaatactctcaaagaaactatacaatcacaattaggcgaagacgtcgaaattgtatttccaaagtacactccgtctgcctctgttatattcttatgtgatgatatagaatttagaaaatcattgttcgagaaggttggtgttgaacttgcagacaatcgtaaaaacttcactttatataaattgaagaaagatgcaacacgattggattttgagttcaatttcactactatagaggaacgagagaaaattattgcgattattcgtgattgtatctcaggtatatacggtatcaagttaaactttgaaaagtctaacgacaagggtgtaacaacttggagtcttacagaagataaatcgcttaaacttgaattggagcagaagctccaatctgaataccgcgaagagtacgtcaatttcgtaaatggaaagaaatacgacgaagtctcagtaatcgatgatgaagagtttgcttcaagcaaattccgttcaagggagcgtatggttaaattcaagcaacgtgctttcttgaaatataatagtccgaaacttggtacatgcaagcgtcgaggaattgactttgctataattcaacttgataccgaagcggaagatggcattgattctggtgaccttcacataacaaagggagattacatacaattccctgcgatgggcgaggcaatggaattgcttcgtcagagccgtgcaatgaatcgtattctacgtcctgcatcaaaattcaatcacaagccaataaacgaaaacctgcaaagtttcatatttgatcctaagtatgcaggagaaactgttgttagcataactgatgcagttgaagacattaagaaaaactgcatatcaaggcctgttccaaatgacagacagatagaagctgtcgccaaatctgttcttgctaatgatttggctttgatacaaggtcctccaggaacaggtaaaacaaccgttatcgctgaaataatttggcaatcaataagacggaatccagaatgcaaaattctgctcacatcacagacgaaccttgcagtagacaatgcacttgaaagactgcaggggcagcctggtattcgtcctattcgtattggtaagccagataaacttgagccagaaggtcgaagattctctatacctattattgatagttggactgcagattctaaacaaaatggcgataatgctgcgaaaatatggattgacagaatttgcaatgccatttctaatgatcctaaatatgctactgcgacatcagcatggaaaaaagaactggaagaccaagatcaacagtctcggagccaattctgtcggttgtacaaaaaaaatgtaaatcttgttgcagcaacatgtagcatttgtggttctacggattttatgagaacatattgcgacatttttggtggcaatcaaaatgatgacatgttctttgatgtagttatcatggatgaagcttcaaaggcgactcctcttgaaatggcagttccgttggttctcggtaagaagattattatcattggtgaccataagcagttgcctccgatgttagacgaaaataccattgattcgtcattggaaaagataggccaaaaagaattggcagaaaagcttcgtaaggcagaatcacagtttaagcgattgttcgaatcggctgcaaaggttcgtaagactatcgtttcaacacttgatacgcagtaccgtatgcatgaagacatcatgaataccattaagcaattctacgaagaagaattggctgctacaggtggccttaaatgtggtatcttgcaatccatggatgatcctgatcttagcaataagggaagtaggtggcatggcttaagcctcgaaccaatatttaaacctgaataccatgcaatttggatagacgtaaccacaccagaaacccgattaaacccaggttataagaatgaaggtgagttgaaggctattgatatggtgttgaaagctctgcaacaatcggaaggctttgatgagttcatgaaggctcaaaagaagcctgaagacaaagagattggtatcatcacattctatagtgctcaaagccgtgaaataaagcgcaaatataaggattgtggttatagaatggatgtcgtcgaccgattccaaggtatggagcgtaacattattattgtatcaactgtccgaagcaatgctaagaataacattggttttgcaaaagagatagagcgtataaatgttgctttctctcgtgctcgcagattgcttattgttgtcggtaacaaacgccaattcgaaagcaatagcaactatgctgcatccattcagagtatgaagacatttcctgttgaacaattaagagccgcattacgatgaaaaatagaagacaaaagacaaataaaaaacagcaagttgctattgtagaaagtttagacactaagatagcaaaagcagtttatgccgaaaaaaagatttcggaaagaatcatcggctatttcccttacgagcttcagtttgtaaaggctacatattttggtacaactcaacgacctgctaaaatttctgcaattgaaaaaggaatagttggcatactgctaattgatggccattcgtcttttagcaccattggtcaaatccttggattagatgtagttaatgacaaagcagaaaagtcaatcttgtcaaaagctttggatggacttcgatcttttaatgctattgaaggtgacgacgactatattgctcttaccgaagcaggtaaggtgtatgctgacaaaggtgaacgtcctgacacataccaaaagtcttttgacatatttgtggattcagaccatgctgattggaaaactattaaaaatgcattgtctacagtaaatgagcatataaaatttatcaacactaagtgtgaagatttgtctttaacaatagatgaaataaaagaatatgcggctgtacaggctcaagatgtacattatccccaagagcgttatttgctagaaagtgcagattggaaagaaggacataaaggtagctataaaatgtacatatgctttgtgcaaggtgtaagtactggtattgttagagcttttgcatttgatgaaaacataaacagccttaatcctgttgtcgcagaatacatcaatagcgatgctaccttggcatcccagttgttggataaatgtataaagtcagagtgcgaaatgaattttgacactcaaatacttgatgaagaagctgcaaaggaagcgaaagctaatgtttctctagacattatcgaggctgaaaagcgtcttgttgatgaagaggcagaagaggagcaaatagttgaagaaacaaatgctgaaaatgagagcaataaagtagaaaaaacttcaattgcaaaatctgcaaagaagacaacagtaaagacaaaagatcgccttcataagaaagctttgtacgactctgtttcatttgaagttgaattgcagaagattttcaaggaagataatccagatgaaatatggcttatgagtccatggattagaaaatctgcatttatgaatgacagaggtcctcttattgagaatttcttggcagatgaaaacaagcgcatatttattgcttattccgaaccagctcaatctccaaatgatgagaaacctatgatagatgaagaagttgagccaggaataaaaatgctcgcagatcaatatccaaacttcttttacgttcaattgccagagtttcattttaagaatgtcattgaagtaaagggagatcaaaagatactattttcaggcagcttcaatgtcctgtcattctatgtttctgagcatcaaacacatgttagacgtgaagaaatggcattggctaacccatcaatagcaaaaagcaaatacgttagtttccaagttgaatttgcagaaaaatatgcagagcgtattaagaaagaaattgaggaattgagtctagaagctgttgaaagttacaaaaatgaaagaatggactacttccttagcattgataattctgaaataaaaaaactatatctccctatagttgaactgttagaagaaaagaagtatcaaggtattgtttcgtctatacgtaagcgtctgactacaattggacaacaactcgtcgctcttgccaataccataggtgttaatagcaagaaaaagatagagttaaagaaagagttggatatcattgagaaggacatgaacacaaattccgttgatgatccgtcattggctgagcttctttccaacaacaaacagttggttgaacacgtcaaagaacagaagatttttccaggaagaaaggaaggctttaagggaaataatcctcagcaaagacaaacaagcccaagaacaataggtgctgtgcagcaaagtggtattcttagtgaagatccagaagcaactaaagacggtctatctttgtatttagcaagacttagtcaggcattcattaatcaggagataaagaagactcctatgaatgacaaactgcttgctatagttcaagatgatgaactcgtcaaactaatggaaatgcttacagtcatgccttcacgtaacagagataatgcttttgatttatcaattggtattagcagttatttgtttaggtatcctacacttttcaatcacaaggaagaatttactgcaaagcaaaagcgaacacagcaacgcttaattcaagtgaatcaaaacaacatacaagaaatagtaaagaagttatcataacatgtcaagattcgaatcatcaagatttgtgcgcaaccctcaggtaatgcatgtggacgtattaaagtccgcatgcgatgctttggggtggcaatacaccatccaagataacatactaacagtttcggatgctaaacagaaatctcgcctatatggtgagtttgcattaaagttgaaccttacaacaaatgaagtcacttacaacacgtattatatgcctaatgccacccaaaaggtattagaacttcaagagcaattctacgcattaaatgccacaactcattaattcaagagtttaagaagaaagggtttaattacaaggagaatgaacatttcacaccaaactcagaagaggtatatagcttctatatggttggacgctctaaagataaaaatgagacggaacctgttgcgcaaataaagttcaccatccttaaagatggcacgatagtaacagattccgactatttgcctaacgatgtcaatgagcgtgctcatgacgcaatggatgttttggaacagctgttaggaaacaagcgtgtgatgacaaagaaacctatacctgcgaaatatgcaggaaagcttaagcctcgccgagtaaatattcaaactattgaatagaaatagctatggaatcaatttatacaaaaatcaaggatatgctatctgcatattaccccgtgttttatctgaatagttttgaatatgacaggacaaaacagaaaatagagggaattgcagaccttttacgcacagataataagaaggtgcgtatctatacttggaattgtgtagagggcttgatggagaagactccagaaggctctttgtataaaggagaagaatacgatgaaccagaaatgactttgaagtatatctataagaatgagaatagagaaattaaagatatctttattcttgaagatctgagcaattacattgaagaggacaaaatcaagtattacatccgtaagatagctgagcatgcaaaattcacgaacactcatgcaattatcttgtctgctatttacaagttaccaacagaactggagaaatatgtaactgttcttaatatacctctaccagatagaacagacatggagcgaaccttggctgttgtagaacgacaaactaagaagaatctttctgttgagatgagaaacaaaatggtagatgcagcattaggcatgacctcaatggaagcagaccttgcattttgtttagcggctgttaaagatagtcttggagaaaatgccccctatacagtttcagcagaaaaggagcaaatcattcgcaaatcaggcatcttggatttctttcccaaaaatgaaagtttgaaagatgttggtggtatggatgttctgaaggattggctattcaaacgtcaaatagcttatcaaaagagagcaagagattggggattgcaagagcctaaaggtttattattgcttggtgtccctggttgtggcaagagtttaacggcaaaaagtatagcctctttttggaatatgccattactacgtttggatgttggcaaagtattccaaggattagttggaagtagcgaagataatattaggaaagcaatagcaactgcagaagcagtcgcgccatgtgtgttatggattgacgaaatagaaaaaggacttggtggtgttcaatcaagtggatctactgatggcggtgtgacttcgcgcatcttttcaactattctgacatggatgcaagaaaagacttctcctgtttttgtcgttgctacagccaacaatatcaatcaacttcctccagaattattgcgcaaagggcgttttgatgagattttttttgttgatcttccatcaaaggaggagcgtaaaaacatctttaccattcatcttaacaagaaaggtcaaaacccgataaagaataattaccctatggagtctctcgccaataatactgaaggttttaatggtgcagaaattgaagagtgtattaaagaagcgatgtttgatgcttatgttgaaaatccagagaatcctcaacttaagacaacgcatctaatgaatgcgattttaaaaacagtgccgttgtctaccacgatgaaagagcaaattgctgcgcttagaaattgggcagcaacgagagcaaagaatgcttcaattattgtaagggaagaggaacagaaggaaatgccaattcttctaactcgtccagagttggaattggaaaggtcatttgacttgaacaactctaaagagaacaaatttggtgtttataatagcgttgccccacctcttgccattccgaacagagaagtaaaaaacgtttatgccgatggtactgcaaaagcgggagagtaggtaaatgccagcccggaagcaaacagggatgataacgtgtgatgcaagaacaattcagaatgtataaaactatgtttaataaaaattattttattaacatcggtgtcatatagattgaacagtcccaagacaaaggggctggttcaaaaaagccatccccgtttaaggaagagttttagaagcagatgggtaagcattttgcagatctaatctggtggtcacaattggtctactactaataatctttttttaatgggacctcctgagcaagagggtaaaagactctatttaatttatatttctatgaccgaactcgaactacaacaataccttctccgcgagtacccacaggagaatgctcgctgtgaatggaaggaatttaagaatcttaagaactcgttctgtggggacgaaaagaatgatgttatttcctacgtgtcggctatcgccaacatggatggaggagatttagtgataggcgttcatgacaagacattggagattgttggaacggacacttataactatgataagcaaaaggcaatattgcgtctaacagaaagatgcgtaaatctttcaacagaagacttatatatagatgagtttatcacagatgatactaatcgtaaagtatgggttatacatattcccaaacatctacccaaacggcccgtgtttgctcataataaggcatggcaacgaatagaggattctctcgtagaaatgactactgaacgcatgagtacaattcttgatgaaccaattttcagtgaaacggattggtcggcacaaattgtatctgatgcaacgattgacgaccttgatgaagttgccatagctaaagctcgtatgatgttcaagaaagtacacagcagaatccctgaagccgaagtaaatgcatggacagtggaaacattcttgagcaagtgcggcataatgaagaacggaggaatcactcgtgctgcaattattcttcttggtaaatatgaatccgctttcaagctacgtccagctgttgttcaggtgacttggacgagacgggatgaaaagcaagatgttgtggattacgaacacttcaccgtgccatttatattaaccgtagatgagatcttatcaaagattgaaaatctaaccatgcgtgaaatgccgggaggcacgctcttcccagacacgatgaagcaatatgacgactatactatccgtgaagctcttcataactgcattgcccatcaagattacacgatgcagcagcgaatcaattttgtagaaaatccgacttacctttattactccaatgcagggagtttcattcctggtactttggaaaatgctttaacaaatgaagagcctcaagcatatttccgcaatgagtgtctttgtagggcaatggttgatttcaacatgatagacacagtaagtagaggtatcaagaaaatgtttaatgaacaatggcgtcgccattttccaatgcctgattatgaaattgacgctaaaaacagaaaagtgtcggtacgcatttatggcaatgaaataaataaacaatatactaatttactcaaaaccaacgattcactgaccttatgggactgcatatcattagatgcagtccaaaagggcagaactattcatgaggatgttgcgcagaatttactaaacagaggacttattgagggcgaagctcccaattatacaatatctttagggattgcaaaggccactaatcaactgcagggttatactaagcagaaaggacttgataaggagaaaatgaaacagatgattttgcagtatcttaagaatgccggtacagatggagcgaaacgtgatagtatttatgaatatatcaaagatgtaatgccgcaagttaagacgcatgaacagcaattgagacttttaggagatatacttagcgcattaagtgtggataaacttatttacgcaaaaggacggatatggttcttaaaagaatagtcataacagaagattttgacggtttattccaattatagcggaaattataacggattccgtcatattatagcggataataaaatccgattaactcatgtcaaattcgtaaattgaagaagtatgttattaggagaaagaataaaagaattaagagcagagcacggagtactgcaaagacaattggctgcactacttgaaatagatactccgatgttcagcaaaatagagcgcggagacagacgagctaaacggacacaagtaatacaattggcagaatatttcaatatagataaaaatgaacttctcactctatggttagcagacaaagtattagatgcggtagaggatgaagacgaattaaaacacgatgcgatagaggttgcacaaaaaagaataggctaacgcttacaattgtcgggaactatatggtatcataactatataattcccgatattaatatttgatattcagtaatatagggacagtcgcgaaataggcttaaaattataacaaattgattgtcaatgtgataaaaatttcatatcttagctacagcccccccccgaagatcatcaacaaccatacgaatctaaaatatttcatagtataaaaggttttagtgccgggcctacggcgggtttttattttcggcagaaacgaggccggtcttaaaaaagcgattctgtccgggagttttttgtgtgtgaagagaaatgtgtttttatctatctgaaaaatagataaaatattttgtatttgcaaatgatttttatttttgatttgcagggtgcttcatattttattcggggtttatgcggtatcaggtcgggagcgtgttgctccgaacgatggcggaactgcaaactttgtcttcgtttttactgtttttgtgggaaaaatgttaattttgtggctcggaagatattgcttgttatggaatcgaaattgaccctttacaacacgctcgaccgccgcaaggaaaccttcgagccgatcaatcccccgcatgtgggaatgtatgtctgcggacctaccgtatatggcgatccgcatctgggacacgcccggccggcggtgaccttcgacctgttgttccgttatctccggtcgctcggctacaaagtgcgctacgtgcgcaacgtgaccgacgtgggacatctggagcacgatgccgatgacggtgaggacaagatttcgaagaaggcgcggctggagcagctcgaaccgatggaagtggcgcactattacacggagcgttaccaccgggcgatggacgagctgaacgtgctgtccccctcgatcgaaccctgcgccagcggccatatcatcgagcagatcgccatggtgaaggagattctcgacaacggtttcgcctacgaatcgaacgggtcggtctatttcgatgtggagaaatacaaccggaaatacagctacggccgtctttcgggccgcaacctcgacgatattctgacgaacacgcgcgagctggacgggcagggcgataagcgccattcgtgcgatttcgccctctggaagaaggcttcgccggagcatatcatgcgctggccttcgccctggagcgacggcttccccggctggcacatggagtgttcggccatgagcaccaaatacctgggccagcggttcgacatccacggcggcggtatggacctgatgtttccgcatcacgaatgcgagatcgcgcaatcgacggcggcgctcggccacgactcggctaagtattggattcacaacaacatgattacgatcaacggtcagaagatgggcaagtcgctcggcaacttcatcacgctcgaggagcttttcacgggcaatcataagttgctgacgcaggcttattcgccgatgacgatccgtttcttcgtattacaggcccactaccgttcgacgctcgacttttcgaacgaggcgttgcaagccgccgaaaagggactcgaccgcctgatgaaggctgtcgaggcgctcgacaagatcaagccgtcggagcaatccacggtggatcctgcggagctcgaaacccgctgccgcgaagcgttggacgatgacctgaactcgccgatggcgatttccgcactgttcgattgggtgcgcatcatcaatcagttggtcgaggggcagcagcggatcacggcggccgacctggagaagctccgggagatcgtccgtcgttatgtgttcgatattctgggtttgcgcgacgaaaaggcggcttcggccggcggcaaggatctggtcacgccgttggtgaatatgcttctcgacctgcggcaggcggccaagaccgagaagaattgggcgctgtcggataagatccgggacgagcttacggccatcggtatccgggtcaaggaccgcaaggacggctgcgactgggagatcgaatagcgtttcgtcgttttaattaaagtattgataaatcgatcgttcctgttcggtgtattccggacgggaacggtgtgtttggatcgtgcgggcggttgccggggcggaaagtccgtcgcagccgtttcgtgcgtcgaatgattattgaagggaggacttgtgtatgagtgaagtaaaaggagcggcgatggagctgggaaccgagcgtatccgcaagctgctcgttcaatatgccgtgccggccattatcgcgatgaccgcctcgtcgctgtacaacatggtggacagcatctttatcgggcacggcgtgggggcgctggccatttcggggctggccctgacgttcccgctgatgaacctcgcggcggcgttcggttcgttggtgggtgtgggcgccgcgacgctggtgtcgatgcgcctggggcagcgggattacgaaacggcccagcggattctggggaatgtcgtggtgctcaacctgattatcggaatctctttcgggttgctgacgctggtttttctcgatccgattctctactttttcggagccagcgatgcgacgatcggctatgcccgggagtatatgtccgtcattctgtggggtaacgtcgttacacacatgtatttgggtctgaacgccgtgttgcgtgccgccgggcacccgcgcaaggcgatgtacgccacgatcctgacggtgacgatcaatgcgattctcgacccgctgttcatcttcggcttcggctggggcattcgcggcgcggccattgcgaccgtgctggcgcagatactcgcgctcgtctggcagttccgcatcttttcggacaggaacgagctgttgcatttccggcgcggcatctaccggctgaaaggcaagatcgtgcgtaatgtgctggctatcggcatgtcgcccttcttgatgaaccttgcggcttgtttcatcgtgattctgatcaacaagggactcaaggagtacggcggcgatctcaatatcggtgcttacggtatcgtcaatcggttgggattcttcttcgtgatgatcgtcatgggcatcaatcagggtatgcagcccattgctgggtataattacggtgcccggcagttcgaccgggtggatcgggtgctgaaattgacgatcatcggcgctacctgcgtcaccacgctcggattcctgatcggcgaattggcgccgcgcctggcggtgtcggttttcacggacgatccggagttggtccgtctttcggccgaaggtatgcgcatcgtcttcttctgcttcccgatcatcggtttccagatggtgacgaccaactttttccagagtatcggcatggcgggcaaggcgatcttcctttcgttgtcgcggcagttgcttttcctgatgccgggtctgattttcctgccccgcatcttcgacgagctgacgccctgggacggcagttggggcgtatggtgttcgatgccgctgtcggatttcctggcttcgctggttgccggtgtcatgctgttctgccaattccggaagttcaaggccaaggccgctgcggggagaggcgaggtttcgggagccgaagtcgaaaacgatcgcagagtgaatgaataaaaaccgttgcactatggaacaggataagttcgttatcaatataggccgtcagctcggcagcggcggcaaagccgtcggcgaggcgctggggcgtcgtctgggcgtgcacgtctatgacaagcagttgatcaatctggcggccgagcagagcggcctctgcacggaacttttcgagcaggccgacgagaagaagtcgaggagcctcttttcctcgctgatcggttatctgcgcatgccttttgcaagtgaagaggggagtgtgaccgatgtgctgagcagtgaggcgctgttcaagatacagagcgacgtgatccgcgacatcgcctcgcgggaatcgtgtattttcgtgggccgttgtgccgactatatcctgcgggatcatccccgcgcggtgaatgttttcgttacgggggctccggaagatcgggtgcgtcgcctttgcgagcaggagaacgtaacgcccgaagaggccgaagcgcagatggagcgtacggatgcccgcagggcttcctattacgactatttcagcagcggcaagtggggcgaagccgcaacctaccatctctgcatcgattcctcggtgctggggatcgaaggtacggccgactttatccgggagttcgcggagcgtaaactgaagatgaacctgtccgggcggtagtcggcggcttcgagcgtgttcggcataatccaaggatgcgtcggacggttttgggaagggatgaaggaaacggttttcggacggtcagtgccggtgtgatggagcctgttttcgatcggtgggttgtgataacgttcggtagcccgttgcccgaggcgatcttttcggtagaagggtttgggcgtccgacttttttcggccaggagctgccagggcgggatcgtttttattggcaacgagcccggttcctatttccgaaaaccggaaattttgtttacatttgttggaagaaagacaggagaggcggctatccttgcgggagagtctgtacggattgcctcgcctgtaaaaatcaatcggaaaatatggtacttgcagaacagattaaagaggctataagacgtcaggatacgttggggaggtgtctttgacatcgatcagcgaagaatagaactccagaacgaggaggagaagacgcaggttccgggcttttgggataatcccgacaaggcccgcgaacagttgcgccgcgtggcgggaatcaaggcgtgggtcgaggagtacgatgctgtggtcaaggaggtcgaggacctgcggctgatgccggaattcgtcaaggagggcgtggtgaccgagcaggagctcgacgagcagtatgcgcgtgcgatgcaccgcatcgaagaactcgaattgcgcaacatgctgcgccgtgacgaggaccgtatgggcgctatcatggatatcaattccggtgcgggcggtaccgaggcgctcgactgggcggggatgctgctgcgcatgtacacccgctggggcgaggcgcacggatacaaggtcaaggtgctcgactatcaggctggcgaggaggtaggtgtaaagtcctgcacgctcgaattcgagggcgaatacgcctacggctacctcaagagcgaaaacggcgtgcaccgcatggtgcgcctgtcgccgttcaacgccaataacaagcggcagacgactttcgcgtcggtgttcgtgtcgccggcgatcgacgatacgatcgaaatcacggtcaatcctgcggacatcgagtgggataccttccggtcgagcggtgcgggcggccagaacgtcaataaggtcgaaacggcggtccggttgcgctatcacggcaaggatgccgatacgggcgagccgatcgagtatctgatcgagaatatggagactcgctcgcagttgatgaaccgcgaaaatgccatgcgcatcctcaagtcgaaactctaccagcgggagctggacaagcgcatggctacgcagcaggcactcgaagctacgaaaaaacgcatcgaatggggttcgcagatccgctcctacgtcttcgacgaccgacgggtgaaggatcatcgtacgggagtccagacctcggatgtcgagggggtgatggacggcgacctggacgaattcatcaaggcctacctgatggagttcggcggacaggcgtaagcgtggggatgtgagaatattgcagggggggcgaaaattttattttcgccctccctcttgttttaagtttgttttattcgatcgaatggatcgaaatcgtatttcctgctgcgggtccccattttccattctttttttgcagggcgtccgtttcaccccagaatccgtagtcgcattggatgatagcttccgtgagtgaagtgtttattacgatatagctgaagtagggtgatgatcgtggattcggataatgtaaaaaggatgaatagcacacgggaaatttacttgtataaaagttgagagcatgttgtgaataaataaagcttttcgactttttgacttcggagtcgataaaactgtcaatggcttttttgtaagatggaatgagttttaagaaccgaatttgttgaggcgcattgcagggacggtaccctttgatgattcgttgcggtgtataatccatttgggaaaaccatcgatgcgacgataagtcttcaggacggaaacaatcgagatattcttcgtcacttaaaatatagacgggaacttctcccggaaaaaccaagttgccgttgacgatccgcccctgtttgtccggagagagttctttgttattgaaataatatttttccattaggtagtccaaaagttgataaacagttgttgttagcttatcgtttgtgtcgtatatcgtcgcggttcggctttcctgctcccatttttcgatgaatttttcgattttttccgaagactgctcggagcatgccgtagtgagttcagagagtaggcgctccgcttctggagtgtctgcgcaagggttacggttttgggcttgaacgattccgagtgtagcaaaagaaacaaaagcgataagcaataccggcaaaaattggatcagacggtttttcatttttatatggtataagttcagttaatcaaagatagtaaattttctgtttttgattgactgatatttttaggtttatccgttttttcgtatctgtcgcttccggacaggcggcagatgccgtcgcagcgcggaatttactgtcggatgcgatcagcctggttccgaaggagtccgtacgggtcggtacgaccgatacggcgatgtattatccccggctcgcaggggagcgtgtgacactacttgcgaatcatacttcgatgatcggcgaacggcatttgatcgatattcttcacgcgaggggattcgatgtgactgcaatcttcgctccggagcacggattccggggaacggccgatcccggagaacacatgggaggttccgtcgatgcggcgacgggtattccgatccggtcgctctgcgacgggaacacgcggaggccttccgacgaggcgatgcactcgttcgaggtggcgtgaacaggttggatgcgggcgtgttatacctaaattatatagagcgattggatgcctgcgtaggtttcgagcgggaagccattggtccggatcggcccaatctcaacagaatgctcatcgacggaccgattctcgaagaacgatacgaggcgggggggggaatatgtgtgccggatgattgtcgagggatatgctgcggaggagatccgcaaccggtggcgggaggatatcgggttgtcccgtattcaaagaaagccatctcttttatacgaagagcgacctttattccgttctattcgtgaataaagtctgcgagtatgccggaatcgctcgcaaagcggaggaaatgttgtttttttatccgatttttcaggccgattcgaaataaattcgtatatttgcaaccatgtcctttgagtaaattgaggtgcaggaacgaagaaatttccataaacaaacctaataattttttaatgcgtatgaaaatcaaaacatttatgtttgctgctttggcagcatttgcgaccttgttcgctggttgtagcgacgacgaaaacaaaaccaacggtggcggtggcaataacggaacgggaggagatcctgtcgagagcgaatataaggtgacgttctccgacacgtcttattacagttcggttgctacgttcgaggcgattacagagaatgccaagtcccagtcttttatggctgtggtgtttgagacggcgttcctggagcagcaaattcccggaattacggataatgatattgcgaaaggtgtcatcaactattataaggcggaatatatgtcgcaaggagccactgttgctgatatttacaatgtgcttactcagcagggacggttgcatggtagtgtaactcctttggaattggatgtccccggtttgtcggcgggtacatcctactcggttgtcgttgccggtatcaacgagaaccttgaaattgtcgctaacggaatcgttgccgagtttacgacgaagacattgcccggcctggaggaggagaattgtactttcgaatggacggttgagcctaaatcgacgtctgtaacaatgagttttactccttccgataagaaggtgccctatttcttctatgcgctgacagctgaagagtatagttcggaatgtcgaaacgaccccgcgatactgaaagagctgctcccttcttttatcgctaacttggccaaggcttaccagatgtctgtttccgagtttatggagaaacagcggatgacgggtgatttggaggagttcactcttactggtttgctgcctaaaacggggtatgtcgtattcgtgtgcggtatggatgagtacggtcgtccgacgacggatgtcagcgtgaaggactttgaaacgttggaatatgtcgcttcggatgctacggtggagagcgtggatgtccgtctgtatgacggtgaggaggcttcgtcaattgatccgactacgtataagcccgatgattacggaggtgcctatttcttgcgatacgtaccccagttctccgaagagtgtgccgaggtttggaatatgttggtgatcgatgtggatctttcgggtgagtctgacgacgtggttttgtcttacattatgagtatgggctttgatgcaaatacttctatgatggatatagtcaagcttcctgagggccttatggtttacgcttatatcgtagcacagaacgaggccggagagtatggtaatatttaccgatgtgaaccgttcgaggtgagcaaggctaacctcagtccggtggaggaacttttccccgagtctaattcgaagagcggaatctcttccgtagctttcagttcggtgggcaagatgtgtccgaagaccgtaaattcgatgaaaatcgttagcgtgttgtaattcggccgctgaccgaaaccgaagattcccgaagtaatttcgggaatctttttttgcgtctttcggaaccggggaggagcagctggaggaaattccgggaattgagtccgaaatatttggcactttgtggaaaagtatttaatttagtaaaaaatatcgcaatgatatattttggtggatctctttgggaatgtagcgccaagttcctccgaggaggggatgtaggggagaattgcattacagacgcagccacaagctgcgaataggcgacccttgcgatgctgcgatctcggatgatggtacactgaaatatataattgcccaaaatgtttattgcaatgagtgtatctgtgaacaagacatattcggcggccgatttgaaattcctcaatttgctttcggagaaattcccgaccattgccgacgctacgactgaaatcatcaacctggaggctattctgaaccttcccaaaggtaccgagcatttccttacggaccttcacggtgaatacgaggctttccgccacgtgctgaagaacgcttcaggcgtgatccggcaaaaggtgcacgaggttttcaacaatactttgcgcgaatccgaaatgacggagctttgtacgctgatctactatcccgccgagaagctgcaactcatcaagcagaaggaatcgaatctggacgactggtataaggttacgcttaaccagctgacggaggtctgccgggccgtttcggtcaaatacacccgctcgaaggtgcgcaagatgctgcctccggatttttcctatgtcattcaggagcttctccacgaatccgattcgccgggatcgcccaagcagagttatttcaacgggattctcaattcgatcatctcgatcggacgggcggatgctttcattatcgccatgagcaatgtgatccagtgcctgacgatcgaccgtctgcatatcatcggcgatattttcgatcgggggcccggtccgcacttcattttcgatacgctggcccagtacaagatgtacgatatccagtggggcaatcacgacattctttggatgggcgctgcggcggggaatttagcttcgatcgccaatgtgatccgtgtgtcggcccgctatgacaatctcgacgtgttggaggacggctacggcatcaatctgctgccgctggcccgcttcgccatggaagtttatgagaactcaccctgcaagccctaccagcccaaagtgatgcagaattcgggtgttacggagcgcgatgtactgctgatggcccagatgcacaaggcgatttcggtgatccagttcaagatcgagggacagatgatcaagcgccatcccgaatacaagatggaggggcgggctttgttggagaaaatcgactacgagaagggaaccatcgagatcgacggcaaggattatcccttgaaggacgccgactttccgacggtcgatccccgggatccttataagctgactccgggcgaagatcagcttattcgtacgttgcaagcctcgttcctgaacagcgacaaactacagaaacatatccggctgctcttttcgaagggcagtatgtatctgatcgtcaattcgaacctgatgtaccacgcttcgattccgatgaccgacgaaggggagttcaaaacagtcatcgtggacggaaaaccctatgccggacggagcctgctggacaaactggaccgcctgacccgggaggcctatttcggtggcaatggggccaagagtcagcagatggcgctcgattacatgtggtacttgtggtgcggccccgaatccccgttcttcgacaaggccaagatggcaacgctggagcgttacctgatcgaggacaagaagacgcaccacgaggagaagggagcttattacaagcatttggatgatacgaagatgtgcagtatgattctttcggctttcggactcgatccagagaaatcccatatcatttcgggacacgtgcccgtgaagacctgcaagggcgaaagtcccatcaaggccggcggcaagctgctgatgatcgacggcggattttccaaggcgtaccattccgaaacgggcatcgccggttatacgttgatttacaattcgcacgggctgcaactggtgcagcacgagcctttcgagtcggcggtcaaggccgtcgaggagggaaaggacatcatctctacgaaggtgatcgtcgaggcgacgaccgaccgcatcacggtgcgcgatacgactatcggcaaggagttgcaggtgcagatcgacgacctgaagaacctgctggcggcctatcgcagcggccagatcaaggaacgtaagtaaccgaaggcagcattgctgcgaaatatccgtgtccgggggactccttttatccggtcggaattctgcgaaagacgactttcgaaggagcgaatcggtcttttcggttcggcagtaaggcgggggataaaagcgggccgcagctattacgctgcggcccgcttctacgatatagacgaaattgaaaatcattcccattctatcggctcaccgctccagcgatcccaatctttccaccgctcggtggtcgcacggacggcttcttcatagtcctcattggtgatatgaatcgtccatcgcacggcacgggggcggtccgggaactcttcatactcccaacgggccgggtcgcgcggcgttccgaccatctcttccgtcataggctttataaaattataaagcatcgcggtatctttctccggacctaaagtcccggccttatcgtttcggtaataaatttctaaataatctaagcctttgttcaagtctttgattaatacctgatccatatcgaaattcaaacccgcgcaattttctatacaacaccaatgcgtagcttgttccttcggcttgaggtagtagaagaatccgtatgggttccttcgtactcttgcagcaatgtacagcggctggtcgctggcatttcgcatacggaagtacgtgtaatagagactgggttcctcgtcctttatgttatcctccatcgaatgatacatctccttatactcttctgaaggctgtaccggctgttcttccggcggagtttccggtgccggactttccgctttgtcggaacaactcaacggagccaagaacaggagcaaggctcctaacgataaatagacacgtgctttcataattaggtaggttttaggttgaacgatcgtcgcctgcaacggtatgccttcgatccttttccacgcgcctcttccggaatgcttgcggccattgtgccgcgagcttcccctttcacgggctgaaacaggcattagacattgcgggatacgcttctcccgcgatgtttctgtgctctataattaagtataatagatagattctgcaaacggaaaggttcgtttgcggcaaaatccctgtacacgtgtctttcgatgtcctgtgatgcacggccccgccgctatcgtccgatgtatttcgacctttccgcgaaatccctttcgagggtgcttcggggcgtatcgaattaacggtcggcggaatcgtgatctgccgttgaaatcggctggaaaactgttgtgaatccctgaccggcggcaggccgtatgggtggatcggccccgggtttcgggcgtgtcggcagatccacttgggaatagacaataaaaaagctcttcctttcgagggaagagcttttttatgccttcttgtaaaattattcgggcttgatcgcttcgctcgggcaaacgcctgcgcaggtgccgcagtcgatgcacttgtcaggatcgattacataaacatcaccggccgagattgcctctaccggacattcgtcgatacatgtgccgcaagctacgcacaaatcgggactaattttgtaagccatttttttgtattgtttaagttgtgtgttgacggtgcaaatataaaaatttatttaatcatatcaaagcccgtataaggaattaacgcttcgggaatccggatgccgtcgggcgtctggttgttctccagcagggccgccacgatgcggggcagggccagcgaggagccgttgagcgtgtgtgccagccgcgtctttttgtcggcatccttgtagcggagtttcaggcggttggcctggaacgactcgaaattcgacacggacgacacttcgagccagcgtttctgcgcttcggaatatacctcgaaatcgtaagtcagcgccgaggtgaaggacatgtcgccgccgcagagtcggaggatgcggtagggcagcttcagtgccttgacgatgctttcgacgtgggccaccatcccgtccagcgcctcgtaactcttttcgggaaggctcaactgtacgatctccaccttgtcgaactggtgcagacggttcagtccgcgcacatccttgccatacgacccggcttcgcggcggaaacagggggtgtaggcggtcatcttcaccggaaaatccttctcgtcgagaatcacgtcgcggtagatgttcgtcacgggcacttcggccgtcggaacgaggtagaagttgtccgccgtggcatggtacatctgtccctccttgtcgggcagttgtcccgtgccgaagccggaggcttcattgaccatgaccggaggctccacttccagatacccggcccgcgtgttgcagtcgaggaagaagttgatgagcgcacgctgcaaccgggcgccctgtcccttataaacggggaaccccgcgccggtgagctttacgcccaggtcgaagtcgatgatgtcgtatttgcgggccagctcccagtggggcagcgggttttcgggcaattgcgtatagctttcgaccagtttcacaaccagattgtcttccgccgttttgccttcgggcacgatgtcggccgggaagttcggcagggtgacgatcgcggcctgaagagcatccgaaacctctttgaattcggcattcagcgcgttcgaccgctccttgagggacgcgacttccgcttttttggcttcggcttcgtcgcgccgtccctgacccatcaatgcaccgatctgtttggccgcctggttctgtgtggccagacattcgtccagttcgtgctggatcgccttgcggcggtcgtccagtttttcgatttcggtgattaccggagcggcgtccactcctttttttgccagacggcggatggccgcctcgcggtcgtccctgagttgcttgatcgtaagcatggtcttgaaatattacgtgttcggagagcaaaattacaaaacaaaccccaatcgcaagcacatttgccgattattttttacttttgccccgagataagacatgcctcgatgcggcccgggggaaccggatgtcgtttcgggttttttcttcggcatattttccgacaaagcaccgtgaaatccatcgaattactcgctcccgccaaagatttgcaggcggccgtcgctgcggtcgattacggcgccgacgccctctatatcggaggcgcccgcttcggtgcgcgccacgcggcgggcaattctgcggaggagatcgcccgggcggtagagtatgcccatcaatacggtgtacgggtgcatgctacgctcaatacgttgctctatgacggcgagttggccgaagccgagcggcaggccagggagctgatcgccgccggggtggacgccctgatcgtgcaggacatggcgctgcggcggatgaatctgccggtcgagttgcacgcttcgacgcaggcggccacacgtacgccggagcaggcgctttttctggagcgctgcggctttgcccgcgtgattctggagcgggccttgtcgctcgacgagatccgtgcgatccgcgccgcctgcggggtcgatctggagtgtttcgtccacggggcgatctgcgtggggtacagcggccgctgtttcctgtcgcgttcgatgagcgaacgcagcggtaaccggggcgcttgcagccagccctgccgcctgacctacgatctggtggacgagtccgggcgtacggtcgtcaaggggcggcatttgctgtcggtgcgggatttgaatttgtcggaccgtataggcgagctgatcgatgcggggattacctcgttcaagatcgaaggacgcctgaaggatgtcggatatattaaaaatgtcgtgagccattaccgccagcggatcgatcgggcgctcgcgtcgcggccgggattctgccgctcgtccgtgggggagagcaggccggactttcagccggatccttcgaagagcttcacgcggggcgaatcggagtatttcttcgacggtcgccgggcgggagtcgcgtcgttcgatacgcccaagtccgtcggcgagttcgtgggccgagtagcccgggttgatggccggaacttcacgttggccgggccgcacgacctggcgcccggggacggcatctgtttccggacctggaacgggttggcgggtaccaatgtcaatgaggtcgccggaaatcggatcgtgcccaaccggatggagggcgtcgtccccggggcggaggtgttccgcaatttcgaccgccgcttttcgttggcgctcgaccgcagccgtacgcggcgcgtgattcccgtgcgtgccgacgcggcgataacgccgcagcgagtaacggtgcgttttaccgattgcgagggggttgtagccgaggttacgcgtgacggggcgttcgaaccggcgaaagattcccggaagatgtcggaaaccgtcgccgcacaactttcccgcagcggagatacgattttcgacgtgcgggaagttcgctccgaagggtgcgaccgtttcgtgccggtatcgctgctggcggagctgcgccgcgaggggctggagcgtttgcgccgggcacggctcgaccgtcctgtcgtccatgcgattttgcccgaggatcgttctgcgccctatccgtcgaaagtcctgacggccgaggagaatgtgacgaatcgtctggccgaggagttttaccgcgatcacggtgtgacgcggattgcacgcggactcgatctggaacctgcgacggcagggcatccggtcatgcgttcggcctattgcattcggcgtgagatcggacagtgcctgaaggagcatccgacgctgaaaggagagctgtttctgatgcgcggccggttccgataccggctccggttcgactgtgcccggtgcgaaatgagcctgatcgacgagagcgatcgaaaataacaaaagagtcccgtgctttcgattggccggatcggtctgattatttcggcggtggaagttgcgggcgagttccgtttctgcgggcggctcggtgaaatttgttcggcttgcacctgttcgccgcaggccggtaaaagaagtaggatgtcggcagtatgccgtgtacgaaccggataattcgttatatgatgtatgattaaagataattccatgtttgaagccctgattccccgattccccgactacgaactgatcgattccggcgatttcgagaaactcgaacgcttcggccgttatgtcgtgcgccggcctgagccgcaggccatttggcggcggagtcttacggagcaggagtggcgccgcctggccgacgcctcgttcctgcgcgacggacgcagcgaagaacgcggggagtggcggttgcggtccgggatgccgtcccggtggacggtggactacgcctacgaagggatgcggctgcgcatgcgcttgggcctcacttcgttcaaacacgtggggctttttccggagcaggcggccaactggaatttcatctacgacaactgtgtgcggatgagagcggaggaacggacgccgaaggtcctgaatctctttgcctatacgggcggagcgacgctcgcggcccgggcggcgggagccgatacgacccacgtggattcggtcaaacaggtcgtgacctgggcgcgggagaatatggagcagagcggtttggagggggtgcgctggatcgtcgaagacgcgctcaaattcgtgcagcgcgaagtgcggcgaggtaaccgctacaacggaattatcctcgatcccccggcttacggacggggtgccaacggcgaaaagtggattctggaggataacatcggcgagatgctcgaatgttgcgcccggttgttggagccgcgcggagcgtttctggtgttgaacctctattcgatggggttgtcggcaacgctcgcttcgaccgccgtgcgacaggccttcggcacgccgtttgaggaacaattcggagaactctgcttcgacgaccgggccggcaagcggcttcccctggggacgtactgtcgttttgtcaggtagccgacgatcggtttgccggtacggggcagagcggttttgaaaaacttatgaaattatgactacgctctctattgtactgggtatcctgacctggtgtcttatttccgtactgatcgggctcgtcggcagccgccgcaagatcggattcgcctggacgttcgttttaagtctgatccttacgcctgtcgtgggccttatcgcggctctgacctcgccgagactgccgcacggaggcgagaaatggggcttcgtgcacatcggattcatggtgcttacggcattggccctgatctctttcctggtagtgctctttacgggcggcatcttcttcgtcgccggaggagagtaagcgcggttaaagatagatcgcgatgcctgcggcagccgagaggacgatcagcaggatcggattgagtttgaagtaggagcctgcgagtacgccgccgaagagaatccaactccagaagtcgatgaagctggcgtcgcctgcgtcctgcggaaacatcagcaggagcgcggccgccccaatcatgccgatcactaccgggcggagtccccgcatggcgccgcttaccagcggattgcccttgagtcgggcgatgtagcgggcgactagaatcatcagcgtcatcgacggcaggcagaccgcgaaagtcgcaatgaccgagcccagaataccgtaccatacgctgccgctttgcattccaactgtgtaacccacgtaagtcgccgaattgatggcgatggggccgggcgtgatctgcgatacggccacgatgtcggcgaattcggcgttggtcatccaggcgtgctggacgaccacttcgttctggatcagcgacagcatggcataaccgccgccgaagccgaagaatccgattttcagatagctgacgaacagttcccagaatatcattgcttactcttttttgcgatagacaattcccagacgatgcctgcacctgcaccggcggcaagaatcagtaccggtgaaagacccagccaccagatcagtccggccagtgcggcggccagcacgatcatgctccagtgcatgccccgcgtgagggtgaccagcggagcgatgatcagggcaacgaccgccgggcgcattcctttgaaggctgcatcgacgacggggttctgacggatgcccgcgaagaagagggcgatcgccaggatgatgaggaacgacggcagcacggcgcccagcagcgatgcgcaggcgcctcggagccccgagcgtttgtatccgacgaagacggccgtgttgatcgcaatagggccggggaccgattgtgccagggtcagcaggtcgagaaattccgaagcggggatccacttgcggtggtcgatcacctcgcgttggatcagcgggatcatggcgtagccgcctccgaaggtgaagagtccgattttgaaaaacgaccagaatatttcccaaagttgtttcattgtaccggttttgaagacggttgtctgtcgtccgttccgatttcggattcgttggcggcagccaccaatgcggtcgccatgacggcggccgtttccgtgcgcaggcgctgcgagccgagcgtgatttcgcggaaacctccccggacggccaggtcgatctcttcgggcgagaagtccccttccggcccgatcagaaccagtacgtcgcctcctttgtgcaggatgtggggcagaaatgccttgcccagggccgaacggggagcgtcgcagtgggcgatgaatttctgtccgtcgaagggctgcttgatgacctgtcgcagcggagttatttcgtgcaggcgggggtggtaggctttgagcgactgtttcacggcagccgtgatgaccttgttctcccgttcgggcttgagcgtgcgtcgctcgctatgctccgtggcgagggggatgatctccgcgaccccgatttccgtggctttttcgaggaaccattcgaaccggtcgttgtttttcgtcggggcgacggccatcgtcaggcggtagggcagcttgccgaattcgctgttggtgtcgcgcacccgcacccggcagcgtttgggattgtcgtccacgatttcacagcggtagaggttaccgcggccgtcggtgatgtgcagctcttcgccgcaggccatgcgaagcacgcggatgcagtgtttcgactcttcctcgctgagcgtatattccggaggaacgatatcgggggcgtaaaacagttgcattttttataaattgtttacctttgcaaaggtaaataaaatccaacgaaccgatgaagcgatattctttatttttaatttcattgattctgcttatgactacgggatgcaaccagcgtaaagaggtggcggagaatccgttcttcgaggagtgggaaacgccctacggcgtgcctcctttcgaccggatccggcccgaacactttctgcctgccttccagcgggcgatgtcgattcaggaagccgagatcgacgctatcaaatccaacggcgatcagccctctttcgagaatgtcattctggcttacgaccgttcgggtttgatgctggagcaggtggggctggttttcaacatgctctgttcggccgacgtgaacgatcagttattggcggcgaaagagcaggcgatgccgttgctggccgcccatcgggacaatattctgctcgacgaggtgcttttcgacaagatcaaagccgtttacgaccgtcgcggcagcctcggcctcgatgccgtgcagacgcgcctggtggagaagatttacggtaagttcgtgcgggcgggagcgctgctcgatccgcagcagaaggagcggttgcgtcaaattaacggcgaattggcgctgctgcccgtgaaattcggcaataatgtcctccgggcgacgaatgattttatgttgaaactgacggagaaacagctcgacgggctgcctgcaagcgtgcaggggatggcccgggagaaggctgcggagttgggattgaacgatgcgtgggtcgttacgctcgacgctcccagccggattccgtttctcacgtattctactcagcgcgacttgcgggagcagttgtacaaagcatatatcgaccgttgcaacgaaggcagcgagtacgataaccgctctctggtgaacgatttcgcccgcctgcgtaacgagaaagcccgcttgctgggctatccctcctatgcggcttatgtgacggccgatgagatggccggaacgcccgctgccgtttatgagttgttgaacgaagtgtggacgccggcgctcgatcgcgccaaggaagagatggccgagatgaatacgatgttgcagcgggatgtgccgggggcgacgttcgaaccctgggattggtggtattacgccgaaaaggtgcgcaaggacaaatatgcgctcgacgatgctacgctgcggccctatttttcgctcgaaaatgttcgggaaggcgctttttcgctggcgaaccggctttacgggattacgttccgtccgttggtcgcaccggtttaccacaaggattgctcggtatatgaggtgctcgacgtggacgggactcatttgggcgtgctctatttcgacttttttccgcgcagcggcaagagcagcggtgcgtggtgtaccgcgttccgcagccagcgctacgaaggcgacgaacgcatcgctcctgtggtcgccatcgtatgcaattttactccgccgaccaaattgacgccttcgctgcttacgctcgatgaggtccagaccctttttcatgagtttgggcacgggctgcatgcgcttttcgccgacgtgaaatatcggtcgctcggcagggtggagggcgatttcgtggagctcccttcgcagatcatggagaattgggcgaccgaacccgaagtgctgcgccactatgcgatcaattatacgacgggagaggtgattcccgaacgcttgatcaagcgcatccgcgaaagcggcaagttcaaccagggcttcattgtcaccgaactggtagctgccgctcttaccgatatggatattcacgctattacggagtacgaacctttcgatgtgaacgagttcgaagccgatgccgtgtacggtcgccggggattgatcccgcagatacagccccgctaccgctatccctatttcctgcatattttcgatgggggctatgcgtcgggatactatttctatatctgggcgcaggtcctcgacaaagacgctttccgggccttcgaacagaccggcgacgtattcgaccgtgcgaccgcccggaaattccggacgctgctttctcggggcggttcggcggacggtatgaccctctaccgggattttcgcggggccgatcctgataaacgggcgatgctcgtggcctgtggcctgatggaggagctgcccgaagaacctgccgacagccttgccgtgcccgtcgtgaccctcgaaccgaatgaaaagcctaaaatctaatttaaccgatgaaaaagattgttatgacatttttaaccgctttggcagccggatgcgcggaccatacgatgcccgttgcccagctgcctgaaattgatacgaacaaccccttgctcgcggagtggaatacgccgcacgaaaccccgccgttcgaccggatccgggtgtccgattacgaaccggcgttcgatgccgcgatcgctgtgtcgcgtgccgaaatcgacgcgatcgtaaacaatccagccaagccgaccttcaataatacgatcgtggcgctcgatcgtcagggccggctgctttcgcgggtcgaaggtatttttttcaacctgctcgaagcggatgctacgcccgagatgcagcaggtggccgagaacgtacagcccaaattgacggccctgtccaacgacatatcgctcaacccgcagctcttcgagcgtgtgaaggccgtctatgaacatccggggtggttcctttcgaaagaggacaagaaattgctggaggaaacctataacggtttcgtgcgcagcggtgcgaacctttccgatgaggacaaggagctgtaccgacaatattcgactgaactttcggagctttcgctccggttcagccgcaatgtgctggctgccacgaatgcctttacgatcaatatcacggatccggcgcaggtggccgagcttcccgatttcgtgcgggacggtatggccgccgaagccaaggcccgtggcgagcagggatggacggtgacgcttcaggcgccgagttacgtccctttcatggagtattcgaccaaccgcgagctgaaggagaagctttggagagccagcaactccctctgcttgggcggtgagttcgacaatacggagaacatcaagcggatggtcaatctgcgtttgaagatcgccaacctgttggggtatccgacgtacgccgattacgtgctggccgaccgaatggctgaaaacgcgcagacggtcaatgctttcctggatgaattgcttgcccagaccaaggagtatgccgtgaaggattacaatacgatcggggagtatgcccgctcgcagggtttcgaaggcgaggtcatgccctgggatatggcttattactcggagaagtaccgccatgagaaatacgagctcaacgaggagctggtgaagccttacttgcagttggacagtgtgaagcggggggtattcctgcttgccaataagctctacggccttaatttcacgccgaatcccgaagtcccggtctatcatcccgaggtgacggcttacgacgtgaccgacaaggacggtcgcttcctggcggaactttacctcgacttcttcccccgggctaccaaacgcggcggggcttgggaaaccgagttccggagcgtttcaatcgtcgagggacacgaaacccgcccgctggtgtcgctggtgatgaacttcaccaagccgaccgatacgacaccttcactgcttactttcagtgaattcgaaactttcctgcatgagttcggacacgcgctgcacgccattctttcggagggagagcacgagtcgatcagcggtacgcacgtatatcaggatttcgtcgagctgccttcgcagatcatggagaattgggcgaccgagaaagagttcctcgacttgtgggccgtgaattacaagaccggagaaccgattcctgccgacctgattgccaagatcgtcgccgcagagaactatcaggcggcttatttcaatgtccgccagttgctgtacgggctcaacgacatggcatggcattcgatcgacaagccgttcgagggcgatgtcgaactgtttgaacggacggcgatggctccggctcaggtactcccggttgtcgagggtgctgcgatgtcgccggctttcagccacatttttgccggcggatatgctgcgggctattacggttacaagtgggccgaggtgctggcggccgatgccttctcgctgttcaaggagaagggtattttcaatcccgaagtggcggaggctttccgccgcgaaattctctcgaagggcggtcacgaacatccgatgacgctctatgtgaatttccggggccacaagcccgaaaccaaggccctgatcgaaaagatggggctcgaaaaatagttgttgtcggaatgggtttccattctgaaaatcgaaagggctgcctataagggcagcccttttcgtgtgagtgtatagaagaccgggatgatcggagaacggatgtggcatgtcgcgcgaagcgtccgtgcggggaagagtagttattctgacaataaaaccacccgtgctaccattgcacgggtggtttatattttagatcgctggcgggatcagaactccgaggtgaagtaaaatctgatgtccttgaagttttcctgcgccagggccagggcatagctggtgtcggccaggaatacgtcgcggccatgcttgtcggtggccatgttcgtatgtttgcgccgtttgaagtcagccagttgctcggcgttgtcgctctcgatccagcaggctttgtagatggagatcggctcccagcggcaggcggcgttatattcgtgtgccaggcggtattcgatcacctcgaattgcagggcgcccaccgtgccgatgattttgcggccgttgagcgacgaggtgaagagctgcgccacgccttcgtccatgagctgatcgatgcctttggccagttgcttgaatttcagcggatcggcattctcgatataacggaactgttcgggagcgaaggagggaatgcctgtgaatttgagcttttcgccttcggtgaaggtgtcgccgatcttgaagttgcccgtgtcgtgcaggccgacgatgtcgcccgggtaggcgaagtcgatgatcgactttttctcggccatgaaagctgtgggcgaggagaatttcatctgtttgccgctgcgcacgtgcaggtagttcttgttgcgttcgaacgtgccggagcagatcttcaggaaggcgatgcggtcccggtgattcgggtccatgttggcgtggatcttgaagacgaagcctgtcattttcgcctcggcaggctccacgatccgggtttcggtcggtgcggggcgcggcgagggggcgatgcggatgaaacactccaagagctccttcacgccgaaattattgaccgccgagccgaagaagaccggggccagttcggcccgcaggtaagcctcgcggtcgaaagcgtcgtacacgccctcgaccagttcggtgtcttcgcgcagttggttggcgtagcgttcggtgatgtattcgtccagttcgggcgatgcgaggtcgttgatctctacggtcgaggcgtcggccgtctgccgttcgtcgctcgtaaagagtgtgaggttcttctcgtagatgttgtaaacgcccttgaaggtgtcgccgctcgaaatcgggaatgagaggggacgtacccggatgcggagttccttctcgatttcgtccagcaggtcgaagggatccttgcaggggcggtcgagcttgttgacgaagacgatcaccggggtctgccgcatgcggcagacgtccatcagcttgcgggtctgggactcgacgcccttggcgccgtcgatgacgatgattacggagtccaccgccgtcagcgtgcggtaggtatcttcggcgaagtcttcgtggcccggggtatcgagaatgttgatcttgcggccctggtattcgaagcccatgacggacgtagcgaccgaaataccgcgctgacgttcgatctccatgaagtcggaggtggctcccttcttgattttattgcttttgaccgctcccgcgacgtggatggcgccgccgaagagcagcagtttttcggtcagggtcgttttaccggcgtccgggtgcgcgatgacggcgaacgtccgccggcgggtgatctcttcctgtaaggtcatagatggtaataaaggttgtggataggtttgcttgcggattatttattgtccggtttggggtagtcggagttgtagtggcagccgaccgattctttcaatgcgctgccctgtttgatgaccaggtaggccacggcgatcatgttgcgcagttcgcacagctcgcggttgggcttgatcttgttgtgcagctcttcggtctcttcgtagatgatcgacaggcggcgcagggcgcgttcgagcgagagattcgagcggacgatgccgacgtagttggacatgatggcctgcatctcgcgcttggactggatgatcatcagcatctcttcggtgtgctgggtaccttcgaaatcccagtcgggaatgccttcctggatttcgaccgaagcgagctgcgaggcggcgtgtttggcggcttggtcggcatagacgaccgcttcgatcagggagttcgaagccagccggttggcgccgtgcagccccgtgcaggaggtttcgcccagcgcatagagccgccggatcgaggtttcgccgttgaggtctactttcaccccgccgcaacagtagtgcgccgccggggtgacggggatcaggtcgcgggtgatgtcgatgccgagcgagaggcatttttcatagatgttcgggaaatgccggcgcgtctgctccggatctttgtgccgcacgtcgagatagacgaagtcctcgccccggcgggtcatttcggtatagatggcccgggccgtcacgtcgcgcggtgcgagcgatttcatcgggtggtatttgtccatgaactcttcgccgttttgcagacgcaggatcgcgccgtaaccccgcatcgcctccgtgatgaggaaattgggcttttcggccggatggtagagcgaggtggggtggaattggatgaactccatgttttcggtgatggccttggcgcggtggcacatggcgatgccgtcgcctgtggcgacgctcggattggtcgtcgaagaatagacgttgccgcagccgcccgcagcgacgacggtgaatttggccagcacggtttcgatctcgttgctctccaggttcagcacgtaagctccgaagcaggccaggccgcgcgtgtggcgggtgacgaattcgcccaggtggtgctgtgtcagcaggtcgatggcgaaatggtgttcgagaaccgtgatgttggggtgcttgcgtaccgaggttatcagggcccgttcgatctcagcgcccgtgaggtcctcgtggtggaggatacgatgttcggtatgtccgccttcgcggttgagttcgaagcgtccgtcgggtgtcttgtcgaatttcgtgccccaggcgatcaggtcgcggatcagctccggggcccggcgaactaccagttcgacggctgcggggtcgcatttgccggcaccgcagaccagggtgtcgtgaatatgtttttcgaaagtgtcgggtgcataggtcaccgaacagatgcctccctgggcatagttggtgttgcactcgtccattttccctttagttaccagggtaacgtggccgtgttctgcggctttgagggcgaaactcaatccggcggcgccggatccgatgaccagaaaatcggttttcatggttttcagcgattggacaggccgagatagtgctggcgtgcgatgaagccggatcgagccgacttatatccggacgcagcctatcagagcgaaattttttgtaaagatagcaaaagggaacgacgagccgaacccgttcgagcttgtccgaaccgccttctatctgatgcaaagatagtgaaagccgagcgcagcgccaaatttatttgctggtctaaaccgggtatcttttccgtaaagaccgggatttttattaattttgtgcccgctatatgctgaaaatggaaagacatatcgacatagaccgtttcgactacgacctgcccgacgagcggatcgccaagtatccgctcgaggagcgatcggcatcgaagctgcttgtttacgaacggggggaaatctcggagcgccgcttccgcgacatcggcgacatactgcctgaggggaccctgctggtgttcaacaataccaaggtgattcgggcgcggattatcatgcacaaaccttcgggtgctcggatcgaggtattctgcctcgaaccgcacgatccggcggattacgagcgggcgttcgccgtgaaaggttcgtgccgctggagctgcatcgtgggtaacctcaaaaaatggaaagaaggcccgctggtgatcgatttcgaatatgaaggtcgcgcggaacggatgctggcctggcgtgagggcgagggcggccgcgagcagatcgtccgcttcgaatggacggctgatctgacgttcggacaactgctggaacatctgggccggattccgatcccgccttacctgaaccgcgagagtcaggagatcgacaatacccgttaccagaccgtctattcgaaattcgaaggttccgtggccgctccgacggccggcctgcacttcacaccggagttgatcgagcggatgcggacgcaggggttttcgttcgaagaggtgaccctgcacgtgggggccggaacatttctgcccgtgaaagaccgcgatgcggcggcgcatccgatgcatacggaacatttcgagatccgtcgaagcagcgtggagcggctgctggagaagtgggataatattacggcggtaggtaccacttccgtccgaacgctggagtctttgacggcgctggcgtggcggatccgtacttcgggtgcgcccgatgcgagccgcgtgatcgggcagtgggagttgtacgacttgcccgaggtgtttacaggccgcgaagcattgcaggtactgtcagactatatggttcgtgaggggatcgagaaactcaaggccgccacgcagatcatgattacgccgctgggataccgtttccggatcgtgcgcaatatcgtcacgaacttccaccagcccaaatcgacgttgctgttgttggtgtcggcttacgtgggagatgattggcatcggatttacgactacgccctcacgcacgatttccgttttttgagttacggggatagctcggtgctgatgcgttgagaactttgaattataaatgaaaacggccggaacgtgatagtttccggccgtttgttgtgacggggattgcttgttagtggcttacggcccccatctcttcgggcttgtgtttgtagcggaagaccattgcgaagacgatggcgacgaccagcgcgtaacccgcaaagatataccatgattcgggccagccgaaagcatcgactaccgcacctgccgcgtaggagccgaagaaagcaccgagtccgttggtcatgatcataaagacaccctgcgccgaggaacggatgtcgggggtagtttccttttcgacgaaaagcgagcccgaaatgttgaagaagtcgaatgcgaccccataaacgatcatcgagaggatcaggaaaacggcacccgatcccggattgccgataccgaagaatccgaagcggagcacccaggccagcatcgagatcagcatcacccatttgatgccgaagcgtcgcaggaagaagggaatcagcaggatgcagaatgtttcggacatttgcgagagcgagagcaggattaccgagtggcgcacgatgggcgagtcggcgtattggggcatcgtgccgaagttctgaatgtaactgtcgccgaaggcattggtaatctgaagagcggcgcccagcagcatcgagaagatgaagaagatcgccatgcgtttctccttgaagagagcgaatgcgcggagtccgagcgtgtcgatccacgattggcttttccgggcatgactgaccggacagcccggcaacgtgaaggagtagatcgcgagaatcagggagaggatggccgaaacgtacagttgccaataggtcagtttgatctgtacgccgcctatctgaaccagatcgacgaaccacatggcggcgatgaagccgaccgtaccccagacccggatgggcgggaagtgcttcacggcatcgagtttcgccaggtcgagggcattgtaggccaccgagttcgagagggcgatggtgggcatgtagaacatgacgctcatcaacatgcaggtgtacagggggccgtaggcggtttgcgaggcggctgcgacgaggaacccggcgctgatgagctggcagatgcccagcagcttctgcgcggggatccagcggtcggcgatgatacccatgagggccggcatgaagagcgatgcgatacccatcgtagcgaagaaactgccgatttgcaaccctgtgaactgaagtcctccgccgaggtaggcgcccagcgaaatgagccacgaaccccagatcgcgtactgcaggaagttcatgacgataagacggaatttgattcccataattggttgatttatgtgttgttttacttttgcaggccgtttttcccgaaaggggttatgaacaaaagtataaatttttttcggaattttctttgcagttgaaaaataaagttctacttttgcatcaccgaaaggacattgagctatggtgtaatggtaacacaacagattctggtcctgttattcttggttcgaatccaggtagctcaacacaaagaacgcgccgctgatattcagcggcgcgtttcttcgttattgcggtcggcgctttttagaagcggaatccgacgtagaaacggacggagttggttttcagtttcgttttggtcgatgagatgccctccaggtctgcatcttcgagtgagaatccattgtatttggcctggccccagcgaccttccacgccgaccgaaatcactttccaggccaccgatccgccgaagctgtagaacagggcgaagttggagttgaaactatcgtcgaggtacatcatcgagtaggagggcgtgagttggaaatagaggctgattttcagttcgtgaaccgggttgatcgtaatcgaaggaccgacctgcatgccgtattccagttgatgattgccgatgtcgatcgtttcatccataatgtcgccgacggaacccgaacccggctcttccgattcggagatcgtgtatttcgaatagttcagatcgacccagctccagtccagaccgaatttcaacattccgagcaacggttttttgtgcaggtaataggttttaccccaactgatcgacacgccgaaatcgtttttcagcttctcgtcgccgaaatccttgaatacgagcgattgttttacgtaaccgaggttgaagtacttggacctgtttttccatattttgcgatcgagttcctcgttcttttggtgccgtaattgctgggataggtcatcgacgacccgctgcagcgaatccgtttccgtcgcaacgggagaggtcgtttcggcgaccggttcttgtgctgtcgcagtcaaggtccacagggacaaaccgattaaaaacgtaaagattttttcataatggtatttttatttaagttgaaggtttctgccgtttcccatactgcaaaaataacattattgtgaaaaaaaagttcgtttgaatggaattattgtccgataagtattatatttctttggttactcttcctcttcttccaaatatatctcctccataaggttgtccagttcgcgccgctcctttttggtcggacgtcccgtaccccggtcgcggaagacgaagaccgtttcgcgggggatgttgagcttgtcgagttccgattgtggagtgatgttgcgacagtagtcggggacgttcttggccggctggcggctcgacacgtagcccacgacttcgaagagataggtcacgggcatccgtttgacggcgattcggtcgccgatccgcacttcgcgcgaaggtttggcgtaggcgtcgttcaccagcacccggttctggcggatggcttcggccgcgtcgctgcgggtcttgaagatgcgtacggcccagaggtatttgtctaatctgatcgcttccatttcgttttttcaattatatcgtacaggcaaaatccgatgtcgggaggctcggtggctccggcagattcggattttccgttgtgctgacgattcgggacaggatgtcggaacagagccgaagccggtagtgtgcggctgcgggctgtccgacgattttcgaaccggaggtcggtagtagcatcgatccctcgggaacggcggtttcggtggggaagtgtcgcgggctatttctcatagatgctttccgatttgggcatgtcgtgcgattgttcgtcgttctgtcggctgacgctcaggatcatgcccagggcgatagccgtgaagatcgtcgaggagccgccgcgtgagatgagcggcagggtttgtcccgtttcgggaatcaggtttaccgttaccatgatgtgcagcagcgcctggcaggtaatcagcagggccaatcccaggaccagcagacccggaaatgccgtgccgcaccgtcggaaaatttcgatggcacggaagaagatccacaggtagagcaacagcagcagcagcgccaggacgatgccgtactcctcgacgaaaaaggcgtaggcgtaatcgctttccgggtggatcatctctacgcgcatggcgctctgtccggcgccttcgcccaggatgccgccgttgtggatggcgatcatcgaacgctcggtgtcggtcagctggtcgatcggcttttcggtttggggcttggtccagaggtcgatccaggtttccacgcggccgccggccgtttcgctgcgccccaggttcagcagtccggccagcatcacggcggcgaaagccaggccgaggagtttcaccagctctctgatccgcacgcgtccgataagcatcatcacccacgaggcgaagaagaccagcacggccgatgaggtgtgggccgggaagattactacgcaggagagcagaacaggggccaggatgggccacgtgccctcgcgccagattttgcgctggtcggggcgcttccatcgcagcgggttgagcgaggggatgatccgcagcttgtcgatcacgctctgccggccggcgagctgccgggccaggaacagtacggtggcgaccttgagtgcttccgaaggctggaactggaaaggaccgagcggaatccagcgggcggcgccgttggtcgtggcgccgatgaaatagacggccagcgtcagcagaacgctgcctgcataggcgaccagcgccaggtggttgtatatccgggagttgatcttgtgtacgatgatgatcagcggaacgcagacgaaaaggatcagcagctgttggcgcaggaagtgggccgtcgaacgagccgtatgcgcatcgtaggccatcttcgccgtcgaggaatagaccaccagtacggaaatgacggccagtgccgcgataatgatccacagcaccttgtccccggcgaagagtttcatgccgggctcctgtccgggtgcgtcggtctgcacagtcgtaccctctgtgttcggattgccggccgttttctccgtctgtttttccgcttccatcttattatttcgcgtgttcggcgacccactgtttgaacagttcgccccggttttcgtaatttttgaagaggtcgaagctcgcacaggccggtgaaagcaacaccacgtcgcccggacgggaagctttgcgggccgcctgcatcgccgcgtcgagcgaatcggtcgaaatgatttcgggaattatgcccgtgaaactttcgaccagcttgcggttgtcgatgcccatgcagacgagcgtatgcactttttcgcgggcgaaccgcttgagcggctcgtagtcgttgcctttgtccgtaccgcctgcgatccagactacgggacgtttcatactctccagtgcgtaccacgtggaatcgacgttggtggctttcgagtcgttgatgtaggttacgccgccgatctctccggcgggttcgagccggtgttccaccggcgcgaagtcgtagatggagctgcggatgcgggtcggggatactccggccgcgagcgccgcgagcgccgccgccatagcattataagcgttgtgcagcccgggaatccgcattttggccgtgtcgatctccaccgactcccggccgaccgtcgcggtgaattttccgtccaggaggaacgcatcgcctgcgccgctcgccacggcgtttttggccgcgaaggggagctgcttcatccgcaggtcgtatttgggcaactgctgccagatcacctcgtcgtcgcccgaatagatgaagaagtcgcgcgaattctggttctgcgtaatgcgcatcttggcatccacgtagttctggaaacagtagtcgtaacggtcgaggtggtcgggcgtgatgttcgtcagcacgccgatatgggcgcggaaccggaacatgccgtcgagctggaacgagctcaactccagtacgtaccagtcgtaatcgccggtagcgaccgagtaggcgaaactctcgccgatgttgccgccgagggctacgttgtagccggcgtcgcgcaggatcttgtagatgagcgacgtagtagtcgtcttgccgttcgagccggtgacgcagatcgtccgggccttacccaggtagcggcccgcgaactccatttcggagatgaccggaatgcccgcttcgcggagtttgacgatcatcggcgccttgtccggaatgccgggcgacttgacgacctcgtccgccgcgagaatccgctcttcggagtggcgcccttcctcgtaggggacctgccactggtccagtttggctttgtagcggtcggcgatccgccccttgtcggagaggaaaacgtcgaatcctttcttcttggcgaggatcgcggagccgtagccgctgatgccgccgcccaggacaactatttttttcatggggttatcggattttaagcgttaccagggtaatggccgccagcagcagcgacacgatccagaaacgggtgacgatcttggtttcgaagaagccttgtttctggtagtgatgatgcaggggggacatgagcagaatgcggcgtccttcgccgtatttgcgtttggtgtatttgaagtagctcacctgaagcatgaccgagaggctctcgaccaggaagatgccgcagagaaggggcagcagcagctccttgcggatgcagagagcgaagacggcgatgatgccgccgatggagagcgagccggtgtcgcccatgaagatctgtgccgggaagctgttgtaccagaggaaaccgaccagcgcaccggccagcgctgccgcgaagacgaccagttcgccgctgcccggaatgtacatgatgttcaggtagtcggcatagacgatgtgtccggagagataggccaggatgcccagtaccaggacgatcggggccgatacgcccgtcaccaggccgtcgagtccgtccgtgaggttggcgccgttcgaaacggccgtgaccaccaggatcgccacgacgacgtagagaatccaagtgagggtgcggttgccgcccgtgagccagctgtaatcgaattcgttgtccttgacgaagggaatcgtggtctgggtcgtctgacggctctcggagctgacgatgcgccgctggatgtggtcggcgatggttcggccgtgttcgtcgaggtagatcgtttcgaccggttcggtcgtcttttcccggacgacgatgtcgggcgagaagcacatggtcgtacctacgataatgcccaggccgacctgtcccacgatcttgaaacgccctttgagcccctctttgtggtggcggaagactttgatgtagtcgtccagaaagccgatcagccccagccagatcgtcgaaaccagcatcagttggatatagacgttgtcgagctgtccgaaaagcagtacggggatgagaatggccagcaggatgattacgccgcccatcgtgggcgtgcctttcttctggagttgtccttcgagccccagatcgcggatctcctcaccgatctgtttgcggcgcaggaagttgatgatgttgcgtccgaagacgatgacgatcagcagggcgatgatgatggctgccgccgcgcggaacgaaatgtactggaacatacctgcgccgggcaggttgtgaacgttgtcgaaatatttgaaaagatgatagagcatgtcgcaggttaatttttagcgtagagggcgaaggcacggagagcctcctccttgtcgtcgaaatggttttttacgtcgccgacgatctgatacgtttcgtgtcccttgccggccagcaggaggatgtcgcccggcttggcgagcatcgcggccgtgcggatggcttcggcgcggtcggcgatccgcaggtagcggtcacccggggcgagtcctgcgaccatgtcgtcgaggatcgcgtcgggatcttcgtggcgggggttgtccgaagtgaggattgcggtggtcgcgtattttacggcgatctgcgccatttcggggcgtttggtcttgtcccggtcgccgccgcagccgcacagcacgaagagctgttgtcccgggtggcggatctcctcgacggtctggagcactttttccagagcgtcgggcgtatgggcgtaatcgacgatcgccgtggtgccgtcggcggcccgtacgaattcgaagcgtccgcttacgggatgcagcgtgctcatgatttggagcacctcttcgcggtcggcgcccagcagcagggctgcggcatagacgcagagcaggttgtaagcattgaagcggccgaggaaatggacccatacttcacgtccgtcgatgcgcagttccataccgtcggggtgtgtttcgaggatcttgcatcggaagtcggccatcgattgcagcgagagggttttgacggtcgcccgtgtgttctgcaccatgacccggccgttgcgatcgtcgatgtttatcagtgcgaaagcctctttcgggagattgtcgaagaagagtttcttggcgcggatgtactcggcgaaagtcttgtggtagtccaggtggtcgtgggtgatgttcgagaagatgccgcccgtgaaatgcagtcctcggatgcgctcctgcacgatggcgtgcgaggagacctccatgaagcagtattcgcacccggcttcgaccatgcgggccatcatctcgttcaggcggatggcgtcgggggtggtgtgggtcgattcgatgcgttcggtgtcgatgcagtaaacgaccgtcgagatcaggccgaccttgtagcccaacccccggaagaggtcgtagagcagggtgacggtggtggttttgccgttggtgcccgtgataccgaccagtttgagctgacggctcgggtcgccgtagaatgcggcggccatgtcggccatcgcggcgttggtatccgctacgacgacgtagcagaccgacggggtgaggtgttcgggcagccgctggcagacaacggcgaccgctccggcggcgacggccgcatcgatgtaggcgtgcccgtcgctttgggtgccgctcacggcgaagaagcagtccccgggagcgatgcggcgggagtcatacgccagtctgctcacacgtgtatcggagttgccttccacgcggagcacctgtgtcgccttgattaattcttgaatttgtttcatctctttatttgagtgttatggttacggctcccccgcgcgagatccgcgtgccgggagcgatgctttggtattggacggagcctcgtcccgagaaggaaactctgaggccccggctttcgagcaggaacagggcgtctttgagtcccatgcctacgacgttgggcatcgtttggtcgtcctgtgcgagcgtcgagatcgtgacgttcgagagggagtcgatccgtaccgttccccagcctttgcggtcttcgaacgaggtgcggggcgagaatttgtcggcgatgcggcggatttgggcgatgtcgccgcctttgattcgccggggatagtgtttttcccctgaattttccggcgagagatcccagtcgtgctcccggttgtagaggtaggtgacgaccttcttgaccaccggacccgagagcgggccgccgtaataggatttgccggcctgccgtttggtgtggatcgtcgtgagcaccgtgtagcgggggttgtgagccgggaagtaggcgaccatgctgccgatgtagtagccgtcgcggtagccgatcttgtcgtcggcgtattgggccgtaccggtcttggccgctacggtgtagagggtcgtgtcgcggaaaaatccagcacccgtaccttccgtgccgacgctttcgagaagtttgcggacctcgcgcagcgtgcgttcggagcatatcttgtccacgagcgttcgggccttgaaatgttcgaccacgtcgtcgccccggcgcagctcccgaaccaggatcggagagatcatcttgccgtcgttggcaatggcgttgtagagggtgatgacctggatcggggagagtttgatacgatagccgaacgagcggcgtacgagcatactgttggggtcgggcacctccttccaatcctgaaagagcggttttttctcgccgaaagcctccagtccgacggtttggtcgaggtgcagctttttcatgaagtcgctgtaacgctccttgttgtcggcataacgctcccagatcgccttggcgaaatagacgttcgacgactgggcgaccgccgtgcggaaatccatgtcgttgaatccggcgtgcgaatcctgcacccggatgccgccgaccttcaccacacgtccgttgcccgtgtcgtaggtctggtccagcggcatatccgcgtcgtccagcaacagcagcatcgaagccagcttgaaggtcgagcccggctccgtgttacgcccgatggcgtagttctcccgctcggcgtatccgccgccgggggtgcggcccagattcacgagggcgaggatttcgcccgtgcggacctccatcacgatcgtggtaccccagatggcgttctgggcttcgagctgttcgcgcaggtaacggttcgccacgtcctgcacatcgagatcgagcgtcgtgaccacgtccagtccgtcgatcgggtcgatgttgtcgccgtccacgacgcggccgtaaaaaccccgggcgatgcgttggcgcgtggcccgaccgtcgcggccggccaactcttcgcgatagacggcctcgatgccgtagttgcctcggtcgccggtcagtccgatcgtgcggcgccccagttcgccctgcggatagatgcgttcgtcgctttcacgcaggttgtaaaccatgcccatgttccagttcaggagcgggtatttgcgcagggtttcccattcggtgtagtcgatgtcgcggggaaagatttggacgggagtgtggtcgcgcagggtatcgtagagttttttcggcacgaattcccggtccaaaatccggtcgatccagcgggcgatgcgtccttcggagcggggaacgagggtgtccttgcggtattttacctggtagtgtttggcatgctgcgtgcggaacatgcgacggtattcggctgcggatctgtcgccgaaataggcggcaagtagtttggacagcgagtcgctctgttcgtggaacgtacgcacggagtcgagccccgggctgccgaaatcgaattcgacgcggtagcggaagatcgaggtggccagcggatctccgtcccgcgtgaggatgttgccccgctgggccgggatgatctgttcggtgaagatgcgtccggcgagccgttcggcattgtaggcgacctccgagctgaagagctgcacccataccagacgtgcgaagatgagcagtcccgccaggatgaagaggatgtagagcaacctcacccgcagcaggatgtcgcttttgatgcgcgatttttccggtttcatcttgctcatcagtcgtcgagaatttcacccggaacgaccgggtcgtacaagtcgatgccccgtcggcgcagctcttcgaggatggccgagtgggtcgtatggcggaaacgctgctcctgaaggcgcgtcgagcgctcgcgcagcatctggacctcgcggtaaagccgcgagtatttcatgtcgaggtgcagcgccgtgaacattacgaagatgctgacgaaaaacatcgcggcgatgcaaatcatgtaacgatagtattccgaggctcctttccgaaccagaatattgcccgaaaagaggagccagaagatgttcgagcggcggcgctcctccttgcgctgctcctcctgccgggcctcctcttcggcctgctcccgctcccggtcggcacgaatttcctcgtcggcttcgccgctctgcacgcgcagcacttcgcgccggatgcggcgggcgagctcttcctcccgctcccgggcggcacgctcctcgtcggtgacggggtcgaattcgtggtcgttgtatttcatgtcggtcggaaacggttattggcgtacgattttggcagcggctcgcagtttggccgagcgcgaacgcgggttgcggacgagctcttccgaggagggagtgacggccttgcgcgtaatgatttcgaacggcgtttcgggcttgccgaagaaatccttttcgatgcgcccctcgaaattgccgctgcgcaggaagttcttcaccagccggtcttcgagcgagtggtaggagatcactaccagccgtccgccggggcgcagcaccttgaggctctgttccagcgccattttgagcgcttccatttctccgtttacttcgatgcgcagggcctggaacagcttggtcaggaatttcgattcgtcctttttcggggtacagggcgctacggccgcaaccaggtctgcggtggtcaggatcggctgcgcggtccgtgcgcggacgatgcaggcggcgactttccagggggtgtcgatttcgccccaatcgcccaggatgcgggtcagggcgtcggcgtcgagcgtgttcaccaggtcggccgccgtgcctcctccgcgctgattcatccgcatgtcgagcggtgctgaaccccggaacgagaatccccgttcgacggcatcgaaatggtgggacgacacgcccaggtcggccaggataccatcgacccgggttactccgtgcagccgcagggcgccccgcatgaagcggaagttgctttcgacgtaatggaagcggctgtcttccgggcagttgtcccgggtatcccgatcctgatcgaaggcgtaaagacgtccccggtcgcccagtgccgacaggatgcggcgcgaatgtccgccaccgccgaaggtgagatcgacataggttcctgcaggatcgatgtcgagcagtcggacggactcttcgagcaggacgggcgtatgatagacggaggtcatttggcttcgatatatatttagggtgtaaagttagacaatttgcagggaaaaatcgttatctttaccgaagaaaaaacggttgagaacggtcgtactccggaaggccggggtgtcccgcttccgggatctccctgtaccgatgcggagtttcgattggaaatccgagcgtaggtgcgataggtgcaaatcgggcgtcgtacgactttcgaccgataattaaaagggttacgttatgccgaaaatagatgtcgatgccgtgcttgcggcaaaggctccccggatcgcccgatgggtgccgggattcgttatccgctggctcaagcgcacgatccatcaggacgaaatcaactatattctggatgagtattccgcgcttcctcctcagcagtttatccaggcttgttttaagttctggggagtgacctattcggtcgaagggctcgaaaatctcgatccgaagggacggtatctctttgcgtcgaaccatcctttcgggggaatggacggtatgatgctggccgacgagctggtcggatatttcggcgatgcgcgggtgatcgtgaacgatttgctgatgcacgtcgagccgctgcgaccgctctggatcccggtgaacaagcacggttcgcaatgcggggaatacctgcgcaggttcgacgaagcttttgcaagcgattgtccgattctgaccttcccggccgggctttgttcgcgccgtcggcagggggtggtgtccgatttgccgtggcgttcgaatttcgtcaagcgggcggcggcgtccgggcgccggatcgtgccggttttcgtcgagggcgaactatccgatttcttttaccgcctttccaattttcggaggaagataggtatccggttcaatatcgagatgctctatctgcccgacgagatgttttcgcagaagggaaaacatttccggatactggtcggggagcctgtttcgacggacgagctggtcgaatgcggatcgtggcagcagcgggcggattacgtacgcgaaaaggcgtattctttggaaaaaaagttgcgtgccgaagcaaaacacggataaattgtttagttttgctctaaatttaacagcatggaacccatcatagagcctgtaagccgaagtctgttgctcgcggaattgacccctgaacgcaaggtccgaaatacgaacaaggcttcgaatgaaatctatattttcgatgccgccgaatgcccgtccctgctgcgggagatcggacgcctgcgggaggtcgccttccggtcggcggggggcggaacggggctcgccgtggatatagacgaggaggatctcgccggcgacggttattaccagttgatcgtctgggaccctgcggagcaggagatcgtgggcggttatcgctttatcgtctgcacgtcggaaaatccccggcatctttccactgaacattatttcaccttcagcgacaaattccgcaaggaatacctgccctataccatcgaactggggcgttcgttcgtacagccttcctatcagtcgcgcggcaattcgaagagtatctatgcgctggacaacctctgggacggtttgggggcgcttgtggtgctgaatcccaaggtgaaataccttttcggcaaggtgacgatgtacgcttcgtacaaggctatggcacgcaatgccctgatctggttcctgcgccgttattttcccgatcccgatcatctggtggcgggtaaaaatcccgtgcagctcgatttggacgatccctattacgagcattttttcacgggcaagacctatgaggagaattaccgtatcctgatccagcgcatccgcgagttcaacgagaacattcctccgctgatcaatgcctatatgaatctctcgcctacgatgcgggtgttcgatacggtaatcaacaccgatttcggcggtgtggaggagacgggtattctgctgaccattccggacatttatcccgagaaaaaacagcgttatatgcgttggcaggggtggcgtgaaaacctcaagcagcgccgggaacatttccgcctccgcctgcaggagcatctctcgcgtatcgggaaaagatgggaagtgtagtcgagccggattttcccgggtcggatgtcttattttgataaaattacgccttttcggtgtaatttttttgtttatggatgcggaatttctcgaaaaattgtaattttatagagaaaagagaagtttgtatgcgtacaagattggtagtgtctttttttatctgttttttgctgcaggcatgctccggagcttcgacgacgaagacgaatggagtgtcgaacacatcgggaaacgatcaggccggatgtatcgccttggatacgatcggcatcgatggtgcggtcgagaagttcgtatggaacgaagaggatggaatcggcttcttaattcaggataatagctatttggactttattaaatcgtctttcacatcgaggccggtgtttgctatgcaggctgctgacggtcgaataacctattcgacggaggatttgatgaaagagatgtggccgaaagagcggatcgaggatcctgtttcggtcgtagcttggcgaccgtatggatttgcgttacaagaggacgggagtttttttcttccggtcggtgtggcgcagtatgatgagaaggggtgccggagcgtgcctatgctcggccggtaccggggaaatctggctgaaatgacactcgatttcgaaaatatgttctccgctgtggagttgcgattgaggaaagacagcttcgctctcgaaccgattaaggtgaaacaagttattttgcagggaaacgacggtgaaattctggcaggatcgatcaaggtggtagccagtaggcaggagctgcccgacagtgtgtgcgaagagaggaaagtcagtccttgcgtcgtattggattgcggatcgggggtggagctgacggaagaatcgacctctttttatctgcctgtactgcctgtggagtttcgccgagggtattcgttaacggtcgtgacggatcgtgacagcgggaatatgttcaggattcaatgcggtggcaaattccccgtaagattgaaaaaaggtcggatataccgtgcggcggatacgattgttcgcccggcgtatctgcaatacatgattcccgatcccaatttccgggcttatcttttggaacaggggtatatcgaagagatcggcgaaaacgggagccgggtcgtagtaacacctgccggtcgggctgcgacgaagatagattgttcgaggcggggtatcgcttccttagcaggaatcgagtatttcccgctgttggaggagttgaattgctgtatgaatatgatatcgacgttggatttgacgcagaatcctcgtttggtaaagttggattgttcgggaaattgtcttaaatccttggatgtaagccataattcggtgctaatggagttacggtgcatgttgaatgagctggtggcattggaaacggatcggaatccgaagctgactgttttgcattgtgcatttaatcgctcgttgaaagcgttggatgtgactggtaatcccctgttgaaagagttggtgtgcacggaaaacagtctgtcgagtttggatgtgtcgcataatttggaactgaaaaaacttatgtgcggaaatggttttgtcaaaaagaaccgtttggaaaccctggatgttagtaaaaataccaaactcgacacgttggaatgctcgggctgttggctgaaaaccttggatgtcagtcggaaccgggatttgatatatttgaattgcagtagaaatgaattggagcgtctgaatctcggcgctgttccgaatttgaaggaattggattgtcccatgaataaattgagccgactggacgtatctcgttgcaaggctctgacatggatttcgtgcgacaggaactcgctctcctcgttagatgtatcccacaaccggtcgttaaattggctgtcgtgtggtgaaaatttgcttactacgttggatgtgtcgcataattcggtgttggaaacgttgtggtgtaatgacaaccaattgactacgttggatctttcgggaaatccgattttgagaaagctgtattgttgcaataaccggttgtcctctttggacttgagtaaaaataaattcttggaaccgaggaatgtgtccgatcacgggaactgtttcccggaggaagagggttcgattgtggttaattcctgctgtttctgaaaaatgaaaaaggggctgtctaacagttttagacagcccctttcgttgctttttggttttaccgcgacgcggcgatattcgagctgtgcatgccccgggaatcgcgggcccagtcgtccctggcgcggagtacctgttcgatgatgtcgcgcacgcagccgtgcccgcccgcgaactccgaaacgtagcgcgaggcttcgatcacctcggatgccgcatccgagggacagacggggattccgactgccttcatacactccaggtccgggatgtcgtcgcccatgtagatgacgttcgccggatcgagtccgtggcgtgcgaagaaatcctgcatggccgatattttgtccatgcagtccaggtaaacatctgtgattcccagcattttgagccggtggtcgagcgttgcgccccgtccgcccgtgatgatgcacactttgtagcccatacggagcgcataggcgatggcatagccgtccttggcatagtattttcggatgaaatccccatcgaccaggggcatgattcccccgtcggtcattacgccgtccacgtcgaaaatgaacgcttcggtctttacgatgtcttctttgaagtttcccatatatcttgacttaatgattcataaattcgtaacagtcgcggatcgtgagcgagtgcggcttcgtgccgccgcaacgtcggcaggtcgccgcgtacggcaggcccggtctgcacccgatgcggatcgcccgaatcgacggctttggctgcggtttcggcgatcaggggtttcagtacgtcgaagggcagttcggtcccgtgcaaaatctcgcctcccaatgcgtagaggtgattgacgaaattgcaggcgaaaaccgcggccaggtgaaggcgtacgcgacggtcggagtcggcacgatataccgtgcggctcagattgcgggcgaacgcttcgagctccgaggtgaaggagtcgtcgtttccttcgacgaaaagaggtattttggcaaaatccacgctgcggccttgggtaaaggtttgcaggggatagagaacgccccgacggtcgaagcgtgcgggaagagcctctattccgatgcctccggccgtatgtaccacagcggcttcggcgggtatgggcaggctttcggccagcgtggtgatcgccgcatcgctgacggccaggatgtagaggtctgcggcggccagctcgcgcggatcggagctccacgcggtgccgttttcgagggcgagtgctgtacctcgtttcgcgttgcgggcgaagatctggagcaatgttgctccttccgtgcggcttatcgcgcgggcgagcgcttcggccaggttgccgctgcctatgaggacgatatttttcatctttccgagtgtttcgattcgggctgcggcccggaagccggtttgcgggcggcgttcactgcgtcgtccaggtcgatgagccgaagccggtcgcccgctgtacggcaggccgtctgaagctcgtcgagcgcgcggtctattcggcgcgtttcttcggtcgcggcgaagtagaggcgtgtcgaactgtaattgtcgatggttctgaaaatgttgtagagcgtcatttcgtggatgtcccgtccgggggcgaaagccacttcgcggtcgtcgtccggattccggatttcgatcagcaggcccgtgcgcacgagctggtgcaggacatcgttcacgatgcgggtgggcagcgagagtcggcggcggagttcatcgaccgggagcgccccttcgttttcccgaaagcggtgtacgacctggagcatgacggccaggatgatccggcgtcgtcggtcgttgctgatgccgagcgattcgcgctcttcggcgaaacggtcgatattctggtaggcgaacgagagttcgccgccgaagagcaggatttcccacgagatttgcagccataacaggaagagcggcagggctgcgaaactgccgtaaatcgcgttgtaggaggtcatccatccttgcagatagaggtagccccactgaaagagcatgaagaccgttcctgcgacgatacccgccatgaaagcgctgcgccacaagactttcgtattgggcacgacggcatagatcagggtgaagctgccccagatgatgaccagggccgaaagtttcgaaagaaggatgccgaggaacgtattccccgcgtcgaagaaccggagcagataacctcccatcgtgctggccacgagccagaggatcggggcgaccatcgcgatgacgatgtagttgaggtattggcgggcgatattgcgcgaggactgaacctcccagatgttgttgaaagcgctctccaccgacccgaaaacccggatgacggcccagaaaagggttacgacgctgaccagggcgataagcccgccctgcgtattggcgagggctttgcgggcgaattccaccatgtagtccaatacttcgacgttttgcgggaaaagggcgtagagatcgtcgatcaggccgtccagaagcccgaatcccttgactacggcgaataccagcgccaggatcgggacgatcgagatgagcgtatagaacgtcagggcggcgctgcgcacgatcgtatcgtgggcgatcaggccgcgtgccgtgtagaacagcagcttgtactgtctgacggcccaccggacgcggggattgcggtaggagtttgcgttgcgccgcaggatcgtgtccgtgaagtaggtgaagacgttcttgactttcatttcgggacgtttctcaaaggtagctattttagacggattgtccaataatcctgcccgagtttcgtgaaggcgatccgtcgctcgccgccttcgcgtatgccgagccgtgcggcgatttcagccgccgtgagcgggaaatcctgtttcagaatcgtcagccggctgccggaaagctcccgtttcagttgcttggggttgtagggctcgatccgttcgatctccagccagcggcccaatgtgtcttcggacttttccgctgcgaatccgtaaccgttcgggctccagatgtcggcgtggccttgcaggtaggtcggcgtcagccgggctttttgaagcgctacgtcggggatcagcagccagcggtaagcggccggatcgaagggcttgtcgcagggagttgcacgggcttcggccggcgtgcaggaaaattctcccagttcgagcgcaacggccgtcagcagggggccggttccgtcggtatagacgacgacttccttgcattcgtcgtgcagggacaccacctccgtgcggcagggaccgaagagccggaatgtttcgccgacgtcgaacagcggggagttcttgacgcagaggttcggggcgatgcgacggagttccggcagcagcttcggtatgtcgggcgaacaatcctccagccgcaccagcttgcgccctccggcgctgcgacggtcggggtcggcgtagatccagtcgaagtggtccagggtcgaggcgaggaacgcctcggcggaggagttgataacccgtatgttcgttgcgcccagccgccggaaattctcttcggcgacggccgccagcgtcgcatcccgttcgagggtgatgacttcgcggaagcgttttgagaggtagagggcatcgacgcccagtccgcaggtaaggtcgagcaccgtgtttccgctgcaacttttgcgggccgcgcatgcctcgctcgaggcctgttcgaaagccagcggcgggaggatgcagcgggcttcgtagtaggaggggagtttcgtccgcgcccgcgcgaggtatttgacctgcgtggcgacgagtgccgcatgcggaatacgcttgtcgagggcgatcgccgcagggtcgcggccgatttgctcttcgacggtacgccgcacttcgggagtcagcagcagtcggtattgttccggagtcatcattccgggagcgaagataccgattttttccgttcggcgctccataggagcagggttgcgaagatgaaaagtccgtaaacgatccagcattgggtcgtcgtgagccggatgtcgagggcggctgccggaagtgccgctgcagctcggatcagttcgttctgtgcccgggctgcgaatcctgcgacgaccgagaagagcggtgcgagcactgttcccgggatcacgagccagagcgtgcagctcccgaccacgacgtaggagagcaggatgacgacggggttgagtgccagcccgacgaccgagatctggccgaaggtatgggagataaggggtgcggtcgcagcggacgctgaaaatccgatggcgagggttgcggtcagcatatcgatgcttttgcggcgtgttcgcaggaggcggcagagggggagtccccaggcgatgatgccggcgacggcgatgaaggagagttggaagctgatgtcgaacaggtaatcgggatggaagagcagcatgacgaaggctacaccggcgagcgtgttcatcccgacgtattccgacgacgaggccagggcgaattgcaggacggagaacatcagcgtggcccggacgacgctgggcgggaatcccgtcgtggcggcatagagccagatgagcaggatgaccgcgatattgcgcaggatgtgtccgtgccggaagagcggcagccaccagagcagcaggttggcgagcagaaagacgatacccacgtgcaatcccgagacggcgagcaggtgcgaggtcccgctgcgcgagtaggccgcacggagtgcaggggagagcgagcggcgatccccggccgtcatagcgttgcagagggcctgttcgtcgggtgccagggccagacggtcgagccgtgcgacggcccgttcgtgcaggaacagggagaggtgcttcggggaaagctcccggtgcagggtgtcgcgcagcagcaggcttgagcggttcaggtagagggtgccgacgtatccccggcgggtcatcagccgtccgtagccgccgtgacgggcggtgaaagggtagattttgccgcgtacgacggctcggtcgccgggattcagtgcggtcgaagagtcgcatcgcaccacgaggtttccagcagcagggagccattctccggttgcggagttccgccgggcgcggatcgttgtgccggaggccgttttgccttcccgttcggagaggcgttcccggacgacgatttcgtattcgcccggagtgccggtcggcggagcgggagtgtgtctcagttcggtgacggtcatgccgaaaagcagaatggctcccagggtggcgaggtttgcgccccggtcgtcggcgagcaatgccaggataccgcagacgaggaatccgcctactaacaaccacagcggcagtacgtagtggtcggccagcaggatgccggccgtgagcggcggcaatgcgcggagcatgggcatgcgccggagtttcgaccggaggttttcggacttgagtcgtagcataacggagccggatcgcgggaaatggacggagaaccgggctttgactttgtgtttttttcgttttctgcgttcggcgggacctcgtggacaatcacgggcctcgtcgatcggatatttgcggtttgcctccttcggatgcgacagaatattcccgcctcttcgttgcatccgcttcgagtgtcggttttcggattcggcggttttccgattcgtaaagataactgttttttcggaagaatgagccgttcggatgtatggataatacaaaacgacacgcatcgaatggaatgatgcgtgtcgttttgtcgtatcggaggttttttcgcccgtttagaacgatgcgaatgtactccagttcgaattttgctccgctgcggcctggatgtcggcaggcaggttggcgaagaaattatatccggtcagcgcttctatttcggcgaccgatttggtgtagctctggtagctttcgcccgaatagacgcggtgaggcagccatacaccgaccgtcgatgccgaagagatcttgcccgaagcctctcttttgactttgagcagtaccttgtaatagtagttcggtacgggacagttcttggtatccttggccggtttgatatatgtgatcgtttcattcccggttacagtccgtaggatggcgcccgtaaccacgtaaaccgtatcggtctgttgttgtgcgagcgtccgcacgtcaccttcgagcgtactccagatgccggagttgaacccgttctgaatctgcggcgtggaattcgtagcgtagaacgtctgcgcacacatggtgccatagggatccttgttgcggtcggcgttcgggatctggtggccgcgagcgtagatgttcgaggtggaacctacgttcactccgtacgatccggcccagacattgatttgttgcgaggtcggaatcccgggtgtcgcagcccacggatcgttcggacgtcccgatcccaggtcaccggccgccaacgggtaagctacccagtaggccgtgtaggtcgaggtgtcgtaatacatcgtgtagttgcgtgccgtgtcgtaaaaggtccgcagcagcatattgctgcctgcgttgtccttggccggaagctcgtaccaggcggcatgatccgtccgtgctccttcggtggtaaaggttgtcgaagaactctgcggcgtggagccgttggtcgccgttacgacgccgtaaaccgtgtacgtcgttgcgggcagaagatcggagaggttggcggtcgcttcgtttccggaaacgaaggcaacgacacttcccgtgtcgctgccttcgttgcggaatagaagaactgcacctcggttgcgtaagcggcgtcggtcagactactggaaaccttcgctgtgctcgaagttatgtcgcttacgctcggtgtggcaattcccggggtagggtctggggaaggattatcgcctcccccttctcccgagtttcagttgatcgtgatggttttaatcatcaacgacttgccgcccgattcagtgtttaacgtaaggacgatctcgccggacagcggagtttccgattcgacaacatactcctggttgttcgtttttgccaaggagatcgtttcgccgagtgcttgtccaccgacggttgcattcacggtacttaagtttgccgtatttgccgacataaccaacgtgatttttttgattcctccggtataatcggacgtttttatggtgacaccgctgggtttcgaccaggaaagaccgcgtatcccgctattggtatcgaatgcagtgggcgctttgcttgcagtccatgtcagtccgtttactgttaagccggcagcgatcttgtctttatccgcgctttcgaaggtgtaggtccaagtttctccgacaccgccttccggcttgctgttctgggtaatgagcaatgtcgcgttggctgtacccagtgaagtagtggcggtaagaacgatgcgtgctgtacgaggtgttgcgaccgtattctctgtggctgcgacttcgaggcgattttcgctgccgttgtaatcacctgtggtgatccagtccggctgttcggttccttcagtgccgtcgtaaatagcgacggaaacgtcttgcgtttcggcgttcttcaacgtaacggggatatagtgagtttccgtatcgttataagacagtgtcagggtggatggatccaacgtgatttgaggcaacttgacgtattcggcagggatcagggtcagatcttttgtctgactgccggtatagaatccgaaaccgaggtttgctgtattatttttcgccaaaatacgggaaggggtcgctgccgatgcgatttggtaagtgcctttgtccttgtccttggtaattatcaagtcgtaagcctccgtagagatcgtagcgctgttgtcactttcccaggagaggtagtttttgccttgactgatcgtgtagttgtcacccgatttggtaattgtccaaatgagggtttcatcacccgttttgtagggatttgacggtgtaatcactacgggggccaaacgagaaccgtcagccagagaactcattgcataggttatttcggattgggtcgccgtgatgacgtagtcgccgctcaatgtttcggttgtctcttccgcagcgtcggtcatatcgaccgcgaaagtcgaactgtcgcctgctgcgaaagccagggcccgcccctcctgaacggttaccgtcttggtgaagatcttcgttgcggtagtcaccgtaacggtgaaggtttcaccggcggccacctcgaacgggaagcaggtgaaataggcggtcatgcccgttgcgccgttggccttaaggttcatctccgaagagtagctcagcgtcacgttgtccgagaaattaccgggataaccgtactccttgacggtgcctgccgtcatatcgacatagctacggcccgtgaccttcttatctggagccgtgaattcgacgccaaggacaggctcctccgatgcgaggtttttgaccgtcatcttaccgatggcaacggcacggccgaaactcatttgcagttcggtcggctgactctccagcgagatcgatttggcgatcagcaggtccgcgttcgaatcgaagctcgtagcggtcggctgttgagatgtgcgtgtgacgactttcatgttggtaatatccgtattgttggacgtaacccatgccgaggcgggataaaccgcgttataaacgagcggagtgttcgtattctccgggaacgatacggcgaatttcgccgtgccgtcgcttaccgtaccttcctgcgagttggcgtatgtggttttggaggcggccgtttcgaacacctgaaggtattcgccggtttcgttccacgagattttccccgtcaggggatcatacgtcgtacgggaaccggatgccgattcgagttcagacgatgcggtgaccgtcatcgttactttacgaccgttcgacgggtcggaaaccgtgtcgtctttggaacaggctgcgaacagagatgcacacactgcgacagccaaaatggatttgaaaaaagttttcatagtcgtaggatgtgtttgttagtattctccgtaatcggtgtcattaacgctgccgcctgcttcgccggctccgccatagtccaggacagtgctgttggcaaaacctttctcgatcgagatgctgaggatctcaaccgaaggagcggagtacgaagttcccccccccttaaccgtagattcgtagtgttttttcataatcatagaggtattatgtttgagagtttttacatcgtgtcctggttatgggctaccacaaatatagacaatattcaattaaggaacaagaaagaatccaaaattcatcgaatcttcatatttcgatgcggattatgcgtgaaagcgtccgaaatttagtataaattgtcgaacatgctctggcttttgtcgtatttcaggtcggcgagggaagccgctttgacgccgatgttgaaactccagctctgataatgaccgaagggaatccatgcgaacgacatctgccaacagtgcaggtcgcgtgtaatggtgatggaggccggagtaagctctttggcctggaagtcgtaaccaccctggaatgtcacgcccattttggggagaatcgtgacgctgccgttgataccgagggtctgggtgatgtttttctggtatcctgtcgtgccgttgttggtcggcgaagaggagtaactgatcgtatagttgaatcccaggttccagggtagcgagaagtcgtaataggcctgggtcatgtattgtcgtcggagcgcagggttcatctgcccgtaagggtcgtagaacggattggcgtaggccggatcgatcggggcgctgttgatgtcgttgatcgccggggtggagttatcctgccgggactggaacgtatagccgaacgaggtgctggccgatactacgcggccggggaaaaagagcttgttgatacgctggccctgcggtgtgacccggtaggggtcgagcgtggcgctgatgttgatgccgaagttctggaagaccgtagtacgcagcgaaatggggatgttcgaaagccccatggagtcggccaggaagttgtaggatacctggccgatgcggagttcgtcgatcagtttgatcttcttcatgcccgaggtatcgcgcttgctgagtactttcatttcgagcgtttgcgagagcgaggcgttgatggccatggactgaccggagctgggcacgccgaagatgctgccttcgaagggcgagtaggtcttgaaattacccagcgtatcgctctgcacggtcttcaggtagccgtatttctgttttgagaagtcgggggcgtaggagaagctcaccgtcggggtgatcgtgtggcggatcgcctgcaccttgcgggttttcttctttgcttcgtagcggccatagacgatcgtcgaagcctgcaggctgaagttgtagttgtacagacgatagaagccgtattccggatcgagcttgtcgatgcggttcagcaccgggttccagacctgttcctgcttcttgaaataccatttttcggtgtagttgatcgtcggcccgaagttgatgtagttgaagatattgtacgtcgccgagatgggaatgctgtgctcgaagccgtactgcatgttctggagcgtctccttggtgaagatttcggactccttggcgttggccttgttgttgaatttgccggtatagcggagcgagatcttctcgtaccagcgctccttacccatcgcctccttgcgtttgaagggatagaaggtcgagacgttgaaaactacgttcggcagggcgatcgagagcgttccgctctgcgagttctgcgaaacggacatattggccgaaagggagaacggagtgccgagccagcttttcgagtaggagatcgtcgaactggtctgcgtctggagcgcctggttcaggttggtggccgaatagcggttatagccgctggtacggaaatcgaccgaggcggagaaggtcgagcccgggttggccttggggtcctgcgtatgctgccagtagagttggaagttgttctgctggagaaagtcgggttcgcccttgtcgccgacacggacgttcgagtagttgaaattcagagtgccgttatacttgtagcgcttcatatagcgcgacatggcggatgcctcccacgatccgagggtgtagataccgccccggatggccaggtccatgtgctctccgagcgtgaagtagtagcccaggtcacggatgtagaatcccttggtcgattcctctccgaaagtcggcatcagcagacccgacttggggccggaactgagcgggaagaaaccctcgggcagcagcggaaagtagatgggaacgtcttccaggaccaggtaggcgggacccgtgaccactttcttgccgggaatcaccttcgccttggtcatcgccaggtagaagtggggatggtccgtctggtcgcaggtggtgtatttgccgtcctggatgtggatggtgttgtcgtccatctttttgacgttgttgccgatcagccagccgtcgccctcctgagtcgccacgcctttgattttcgcctttttgctgccgatgttgtaggtgatcgtgtccatcgtgtagggattggcggctccttcggtgaaagtggggttggtaactgtcggtttgccgtctatcgtgtcgcgcttgccgtgggcgtagatgatcttttcgtccatattgacccgcatgaaatctcccttgagattcatgttctggtagttgatatcaccctggttgtagatatagaccgtgcggttgcgtacgtcgtagtagagcgagtcctggtttttgccgctgatgatgtcgtccaggaaagattttttccgggtcgtatcgcgctgggtcgtgtcctgacgcaacgaatcgcgcagcagcgagtcgttgccggtgggagccgtactgtcggcgggggcgatcggcgagaggggaggcgctccgaagatcgagtcgatcctggtgtcgaaaagcgaatcctgctcctcttccgtacgtgtttcggcggtcggggggcggtcggcttcccgttgaaggcgccgaatctcccggcgggtttcgcggcgggatttttgtacggcttgcgtcggagtgctgtcgggcggtgtttggcgttcgggtgtcgcgggatgctgcactccgcccggcagcgccatgccgagcaccggaagcaggaagagcagcaggagtgctcccgagaagatatattttgcctttagcctgtccaaaattccaaaaaaaatcatacctttgccgacgagtcggcaaaaccgcccgaaaatggctccgaaggcctcagtgcgggggttttaacatccggcaaatataggtaaaaaattcagaaccgttaaattttcagccacttttgctatgcggaaatcgctttttcttgttgccctgtttttgattgcgacactctctttcaacggagttgccgcgcagaatattgcacagggcgtgcgggtcgtcgtaatcgatgccgggcacggggggccgaagtttccgggagctcattacagaggcgtttatgagaaagatctcaaccttcagatcgctctgaagctcggggccttgatcgagaaggagatcccccagttgaaagtggtttacacgcgtaagacggacaagcagttttccgaaagtctgacccaggatttgcaggctcgggccgatatcgccaacaaggcgggcggcgacctgttcatttcgatccataccaatgctgcggcatcggcgtcggcacggggagtcgagaccctgattatgggtgagagtccgctggagaagaacgccaacgagcgggccctctattataacaaccaggaggagctgctcgatatgtcgaacgagaagacggcggcgatcgttcgggcttatatccagaacctgcagttcacctatggtgaatacagcgaagcgatggcccgtctggtgcagaaacattacgtcaagtccgggcggcacaatcgcggtgtgaagcgacagccgctcaaagtgctctacgctaccgatatgcccggtatcctgaccgagataggtttcctttccaattcggaggagtacgcttatatgaattcggcgaaggggcaggctcaaatcgcacgtgcgctgtgcgatgcggtgaaggattacgtcgctttcgttcggggtgcgctgcttgtcgatgacgatgccatttacgaacaggccgatgccgatgtcgcagagccggcttcggctgccgcttcggacaaagcggataagggtagtgtcaaaaccgggaaagccgaacaggagaagacgttttatgccgtgcagttgatcgccagcgccaagcgcgtgccgcccaaggaccggcagttcaaaagttaccggggaaaagtcacggagttcgttaccggcggccggttcaggtataagtattgtgtggggcgtttcgatacccgcaagcaggccgaagccaagttggccgaggtgcgcagggagttccgcgatgcgttcgtggtgagttgtcggggcgaccggatcgtacagtaaataaaacgaaaaaaacaggtatatgagaagagaagttaagatcggcattttcgccgtgctgatgatcggcgccctctgggcgggtatccgctttctgaaggggttcgacatcttcagtcgcaacgcggtctattatgccgcttacgaccaggtcgatggcgtgcagaacgcttcgccgattctgatccggggcgtgaaggtgggagccgtgacggatatttcgttcgatccttcgatcggtaacgaggtcgtacttcaactgacgatccagcggaaataccggattccgtccaattccgaagcccggatctacagcaacagcatcatgggcgccaaagcgatcgaaatcgctctgggcgatgccgggacctacctgcaatccggggacaccctctgttcgagccgcagcaagggcctgatggatatggcgggttcggaactcgaatttttcaagcagaagatgtcgcaggtcgtgggggatttgagccgcacgatggataacctgaatctgattatggagcagaacgccgcgaatatcgaaggtacgatgtcgcacctgaattcgattacgggcagcgtaaacggtatgttgctgtcgcagcgtgcgaatctggagagcgccgtagcgaatttgacccgtttttcggagatgctcggcgagaactctccgcgtatggacagtattatcctgaatttaagcaattttaccgaccaaatacagcgtgagaatctggccggggcgctcgattcgactctgatgaacctcaatgcgatcttggcccgtgtcaatgccggggaggggactgtcgggcagctcgtcagcgatccccgtctgtacgaatcgctcaacgaggcgactgcgaacttggcgtcgctgctggccaacttgcaggcccatcctgctcgttacgtccatttctcgctgttcggccgcgatcccgaaaaggccgaccgcaagcagcagaaaaaagaggcgaaacatgcccggcgcgattcgctcaaggccctgaaagcggcccgatagtttcgaatgttttctctgtgcgatgatctatccggcgaactttgaacagaaagtcggtttcgaccggctgcgtgagcaggtcgcggcgctgtgtacgattcgcggcggccgggaaaggttgtgcgccgaacaattcagcacttcgcaggccgatgtcgagcggcggctggcgctggcggacgagatgcgccgtctgctggagatggaacgggactttccggacgacgagttcgtcgatgtcgattatatcctttccaaactgaagatcgaaggcagtttcctcgaagtcgaggaggtcgtgttgctgcgccgggcgctggcttcggcgggggcgatcgccggttttatcctggggcgcggtgaggagctatatcccgaactgcggctccgcagccgggggatcgaggctttcccggagatcgttcgggcgatcgacggtatcgtcgatcagtacggcaagatccgggacgacgcttcgccggagttgcagcagatccggcggatgatccgcgagcgggaggggcaggccgccaaacgcctgcagcaggtgttgtcgaatgccaagaaagccggtatcgtggaggccgacgcgatgctctcgatccgcgacggccgggcggtgattccggtcgcagcggccaataaacgcaagttgcagggtttcatccacgacgaatcggccacgggcaagaccttctacgtcgagccggtcgaggtcgtcgaaatcaataacgaactcaaggagctggagtacgccgagcggcgcgagatcgtgcggatcctctcggccttcaccgactcgattcgccccgaagcggatcggatcgcgctgattggcgactatctttcggatctggatatgatccgtgccaaagcccgctgggccgttgccaacggagcggtgaagccgatcgtttcgacggacgaccggctggtgctgcgcaatgcgcggcatcccttgttgcagcagacgctccgggcgcagggcaagcaggtggtgccgctcgatctgcaactcgacaaacggcgtcatatcctggtgatttcggggccgaatgccggcggcaagtcggtgtgtctgaaaactacgggcatcatccaatatatgttccagtgcggattcctggttccggcatcggagaattcggagctgcccctgttccgcaacctaatgatcgacatcggggacgagcagtcgatcgacgacgatctttcgacctattcgtcgcacctgctcaatatgaagaacatgctcgccggagcttcgaaccggacgctggtgcttatcgacgagttcggttcgggtacggagcctatcatcggcggggcgatcgcggagtcgatcctcgaacggctccgcagtaaaggctgttacggggtgattacgacccactatgccaacattaagtattatgcgtcgaacaccgagggaatcgccaacggagcgatgatgttcgacgtgcagaatatccggccgctgtttcggctcgagatcggcaagccgggcagttcgttcgcggtggagatcgcccgcaagatcgggttgccggaggatattatccgcgatgcgggcgaaaaggccggcagcgatcatatcaacctcgagaaacagttgcgtgaaatcgcccgtgacaaacattactgggagcagaagcgcgaccgcatccggatcgccgaccgcaaggtcgaggagctggaacagacctatgccgaccagctttcgcgcatccggcaggagcgctcggaaatcttgaaaaaggccaaggaggaggcgcagcggatgatcgccgacgccaaccgtcagattgagaatacgattcggacgatccgcgaagcgcaggccgagaaggagcttacccagttggcccgtaaggagttgaacgattttcgggacagggtggagaggacggatgcagcggatgcggcgcacgacgaacgggtggcccgcgaaatggagaaactcgaacgccgccgccagcgtcgtgccgagcgcagacagcaggccggcgagactccggaggtcgcacagcctgccgtgccggagaaaccccgcgaggcggaggtcggctcgaaggtgaagatcgccgggcaggacattcccggcgtggtgctttcgatcaagggccggaaggcgcaggtggcattcggacagattcttacgacggtggatagaagttcgctcgtcgtgatctcgggcgccgaattcaagcaggcgaccaggcccgtgcagccgcgcacggtggtatcggtcgatgtgtcggcccgcaagctcaatttcaaggatcatatcgatgtgcggggcctgcgtgccgccgaagcattggaggaggtgcgggattttatcgacgacgcgatcatggttggcgtcggtacggtcacgatcctgcacggcaaggggacgggggcgctcaaggaggagatccgccgttatctgcgcacggtgccggaggtcgaacgggctgcggacgaacacgccgaccggggcggagcggggattacggtggtgactctgcgtatggattgacggcagttatgtaaaggaaagatacgacatgaaatacatgttatcggaaatcgcccgcatttgcgggggcgaactcatcggggaggatttgccggtggcacgggtgcttaccgacagccgcaactgttcgttcggcgaggagccgctgttcgtggccatgaaaggtaccaatcacgactcccacgcctttattggcgagatggttcgccgggatgtgaaggcatttcttgcggagcggaagacgcaacttccggccggttgcggctgcgtggtggttccgagcgccatcgctgccctccaacagcttgcggcccatcaccggactcggttcaaggggcgcgtggtcggtatcacgggttcgaacgggaagaccgtggtcaaggaatggatcgcccagcagattcctgccggcgtcaaatatttccggtcgccgaaaagttataattcgcagttgggcgtggcgctctcgctgctgatgatcgaaggggacgaggagttggcgttgatcgaagcggggatctcctgtcccggggagatggtgcgtctggagcggatgatccgccccgatacggtgattttcacttcgatcggcgaggcgcaccaggaaaatttcacctcgctcgaggagaagagtgccgaaaagttggtgttggcgaagggagcgcgaaccattatttatcatggtggctcctccctgctcgaacggatgatccgcacgttatacggcggccggcagttgcaggacgctgcggaatatccgctgccggagcagttgcccgcaggggttctggagagcggggccgggcgtgtcgatgcccagttggtcggggcgttctgtcgggtgatgggctttcccgaccccgatttcggccggattcggcccgtggcgatgcgcctcgagttgaaggagggaatcaacggttcgctgctgatcgacgacgcttacaattcggacatcaactccctctccattgcgctcgactacctgcataatatggccgccggccgtcccatgacacttattctttcggatatcgagcagagcggcgtcgaggacggagtgctttacggcgaagtggcccgtctggtggccgccgccggagtgagccgtctgatcggcgtgggagaccgtattcgaaatgccggggcgaatttcgcctgcgacagcgccttttaccgcacgaccgacgagctgctgcgcaacctgcgccgcgacgatgtggccgggcgcgtggtgctcatcaagggcagccgtgacagccacttcgagcgggtgagtcatgcgctcgaacgcaagagccatacgacggtattggaggtcgatctcgatgccatgatccacaacctgaattatttccgtgcgcggctccgtcccggggtgcggctcgtggcgatggtcaaggcggccagctacggcgccggggatttcgaggtggcccagatgctccagcatcagggggtcaattacctggccgtagctttcgccgacgaaggggtgctgctccgcgagcggggaattagaatgccgatcgtcgttctgaatgccgacgagggcagtttcgatctgatggtcgctcaccggctggagcccgaaatatacaatttccgttcgctggcgtttttttcgaaagccgtcgaacgggtcggagaggagagttacccgatccatatcaagctcgatacgggcatgcaccggttgggttttatggaaggggagttggatatgctgaccgaaacgctgggcgaaactccgtcggtgaaggtcgctacgatcttttcgcacctgaactgttccgatatgccccaggaggatcgttatacgcgggagcagatcgcccgtttcgaccgtatgagcggccgtctggctgcggcgcttccctatccggtgcttcgccatacggccaattcggcggcgatcgagcgtttccccgaggcgcagttcgacatgtgccgtctggggttgggactttacggtttcggcttcgagcataacgacgagctgaaacccgtttcgacgctcaaaagccgtatcgtgcagctcaagcacctgtcggcgggcgaagccgtcggttacggccgggcggggaagctgacgcgtgacagcgtgacggccaccgtgccgatggggtatgccgacggactggaccgtcatctggggtgcggccggtggtcgatgctggtcgcggggcggcccgcgccgatcgtgggccgcgtctgcatggacagttgtatgatcgacgtgaccgacattcccggcgtggaggagggggacgaggtggtgatcttctccgcggtgccgggcaatacgcccgaagatatggcccgcgtactcgatacgatcccttacgaggtgatgacctccgtgtcgggccgtgtgaaacggatttacagcaaagagtaaaaaagagaatcccgacggagccggatgccggggcggtggcagaggcggggttttcgataaatggaatgaagatatgtcgcaggaacgaaaaccgggacagccgggtacgctttacctgattccgtgtccgatcgccgaggatacgcccgtgtgggacgtgctgccggcggcgaaccgggccgtgatcgactcgctggattatttcatcgtggagaatgtccgctcggcgcggcgttttctgtcgaaggcgggcttcggccgtccgatcgacagcctggagttccgggagctgaacgagcatacgaccgatgcccgggctgtggacgagatggtgcgtccgattcttgcggggcgttctgccggagtgatctccgaggcgggtgtgccgggagtggccgatcccggggccctggcggtggcccggtgtcaccggctcggaatccgcgtggtgcctttgatcggtccttcgtcgatcatcctggcagtgatggcgtcggggttgaacggacagtcgttcgccttcaacggctatctgccggtcaaaccgcccgaacgggcccgggcgatccggacgctggaacggcgtgcgaccggcgagaggcagtcgcaggtttttatcgaggctccttaccggaatgcgaagctgctcgggcagttgctcgaggtatgcgcccccgatacgcggcttacgctggccgtcgatattacctcgccgcaggagtatatccgcacgctgacggttcgtgagtggcgctcggccctgctgccggaaatggataaacggcctgcaattttcattttgggctgatgcttctgccggttggtatatattttggacaatagaggagtggaaaatcaaataatacatcagatatggacaaggaaaaggtttataatgaagcggttggcggcgacgaaggcttcgcggcgggcgatgggtatccctcctgcgacggggagccgtgtgccaatgtgacagatgaaagctctgccgatgctgacacaatggcaggggataggaatacaccgaaagcggcttcggaggagttgccttcgcgcgactgggaggcggagattgcggagtggcaggacaagtacctgcgtttgcaggccgagttcgacaatttccgcaagcgcacgctgcgggagaagatggagctggtgcagagcggaagcgccgagtgcgtgaagaatttcctgcctctgatggacgatttgcagcgggcgttggaagcgatcgagaagagcaatgacctggaggcgcttcgtgagggtgtgaaattgatcgcacagaagttccgggaaacgctcaagaaacagaatgtgaaggagatcgaggcgctcggactggagttggataccgatcaccacgaggcggtggcccgtttcgatgccgggaaggagaagaagggcaagatcgtcgatgtggtacagcccggttacaagatgggcgacaaggtgttgcgttttgcgaaagtggtcgtcggagagtaacgggcgttttcgtttaacgggcgcggagttgctccgtcgcgcactattgtgccgagcgtagagtgtgaaaatacgactattgaaaaagaatattgagccggaatcgaagtccggcattcgaatactatggcagaaaagagagattactacgaagtgcttggcgtggcgaagaacgccaacgcggatgagataaagaaagcttaccgaaaggcggctatcaagtatcacccggacaagaatccgggggataaggaggccgaggagaagttcaaggaggcggccgaggcgtacgatgtgctctccaatcccgaaaagcgagccagatacgatcagttcggccatgccggaatgagcggtgcggccggagccggcggcgggttcggcggattcggcggcgggttctcgatggaggacatcttctcgcagttcggcgatattttcgggggccatttcagcggcggaagttatcggacctcttcgagtggcggccgtcgcgtaagccgtggtacggatatccgtgtgcgggtgaagctcaccctggcggagatcgctgccggaacggtcaagaagctcaagatcaacaagcagatcgcctgtcctaaatgcggaggtacgggagccaaggacgccaactcctattcgacttgttcgacctgcaacggagcggggtatgtgaatcgtgtcgaaaatacctttttcggtcggatgcagacccagagcgtgtgtcccacgtgcggcggtacgggcaaggtgattaccaatccctgcgacgagtgcaagggcgaagggacgatcaaaggctccgaggtggtggagattcggattccggccggtgtgggcgatggaatggtattgacggtgtcgggcaagggaaatgcggctcgtcacggcggtgtgaacggtgatttgcaggtggtgatcgaggaggagcacaatccggaactggtacgcgatggcaacgacctgatccataatttgaatattacggttccgacggctttgctcggcggttcggtcgaggttccgacggtcgatggccgggcgcggatcaagatcgcgccgggtacgcctgcgggcaaggtgctgcggctggccggcaagggcttgcccgacgtgaacggttacggacgcggcgatatactggtcgtggtggatgttacggtccccgccaagctcaatgccgaggagaagcggttggtggagcaactggccgcacagccttccttccagcgggccgaggcgtccaaaggacacaacattttcgacaggatgaagagtttcttccggtaatctacggtcgaaaagtcagatctcccggagtgacatggctggttattccgggagtttttcgtatctttaccgaagaaataaccggtttggacggctgcattccgatcgggagtaacacgacgtgttgccggccccgtattttttacacaggatgatgaggcgggccgatgcgattcgtctgttcggagcctcgcccgggccgctgctgtcttcaccttaaaaaacagaattttatgtccggttttacgccgtttaagaaacacgccaataaattcaactacctgccgcgctactacgatcccgagaaagaggagcgcgaccggcgtcgtgccgagctgcgcggcgaacgggccgaggatgcgggcaaagagtataagccgggacagtatatccgtacgcaaagccaggcccgggcagcccgccgccgcgaagagatgtcgcgaggctccggccgtatgtggatgatggtcgtactggtcgtgctggtgcttttgttcttggtgttcggctatccgcgtgtggtcgcgttcatttccgacatgcagaaacccaaaaccccgcagaccgaggagttcaatccctacactccgattacggtcgtccctaacgattatgaggagtaatggctgatcgtatcaaattactgcccgaggtcgttgcgaaccagattgccgccggtgaggtggtgaaccgtccgtcgtcggtggtgaaggagatgatggagaacgcgatcgatgccggagcccgcagcgtgaaggtcaatttccgagacggcggcaaggagctgattcagatcgtggacgacggttgcggcatgtcgcccatcgacgcccgcatggctttcgaccggcatgctaccagcaagatctcttcgctggacgatatttatgcgctcaagacgttcggcttccggggcgaggcgctcgcgtcgatcgccgccgtgtcgcaggtggagctgcgtacgcgccaggcggaggatgaagtgggtacgctcacgacggtcaatggcggtgagttcgtttcgcagaccctcgcggcttgtcctgtggggtcgcagttttatgtgcgcaatctgttctacaacgtgcctgcccgccgtaagttcctcgaaaagagtacgacttccacggggcagatcaagtccgagtttcagcgggtcgcgctctgcaatccgcaggtggggttcgaattgctgatgaacgatcagccgctctatcggttgcccgctgcttcgctggcttcgcggatcgtcgatgtggtggggcgtcatatcaaacagaacctgctggaagtcgatgccgacacgtcgatcgtgcgggtgacgggcttcgtgggccgtcccgctgccgccaagaagagcaatagttcggaacagtatcttttcgtgaacgggcgttatttccgctccccctattttttcaaggcgatcctgaaggcttacgagaagctgattcccgatgcctgttcgccctcctattttctctacctgacgatcgacccttcgcggatcgacgtcaatgtccatccccagaagaccgaagtcaagttcgctgacgaagaggccgtgtggcagatcatcaacgctgccgtgcgggaaactctcgccaagacgggagcggtgccgctcatggatttcgatcagacggacagcgtcgagattccggtgctgaccaaaggggccgtttaccgtgaacccaaggcgatgtcgaacgagagttacaacccttttcgtgcggattacgcttccgatgtgtcggaacggatgcccgacgtggatttttcgggcttcgacgctccttacgacggggagatgcctgccggaaagggtgtgggggcggaggatcgatacgacgagatgatcccttctgccgggttcgctccgaccgaaatggagttcattccttctgccggggaaccggtgcaacaacggctgatggacgatcctgcggcttgtttcagcggtgtgacggtgctcggcaacgggtatgcctcggcgctgtacggcggcaagtgggtggtcgtggacctgcgccgggcgcgggaacgggtgttgtacgacaattacctgctgctcctgaccaacggatcgtcggtcagccagcagctccttttcccggagcgtctcgcgttttcggaaaacgaatatgcgttgctcgaggagaatgcggtcgatttcgcggcgttgggtttcgacctggagttttgcggcggcggagccgtcgaggtaaagggcgttccggccgacattccgcacgatacgatcgaccggttgatttacgaattgctgcaggagttcgccgtgcctgtggacgttcaggcattgcggcgcgagaagatcgccgctgtcatggcttgcagcggagcccgcagcatgtcccgtacgatttcgacggaggaggccgaatctctgctggggcagctctgcgaaggcgggaatgtcagcttcacgccttcgggcaaggcggtcatggccaaaatcacactggaagaaatccgcaataaacttggttgagaggttgccggaagggatataatcgttacatttgcatctaaatcttactttgtctatgaataatagccgctatttttcttcgacgcctcccgtagtgctgaacctgattatcatcaatgcgttgatgcttcttgcgaccgagctgctgcctgtcgggaacagaatcgtcggggcgctggcgcttttcaacgtcgagagtccgttgttccattcctaccagttggtgacttatatgtttctgcacggtggattttcccacttgtttttcaatatgttcgccttgtggatgttcggtcgtacgctcgaatacgagttggggtcgaagcgctttctgacctactacatggtgtgcggcgtcggtgccggggtgttgcaactgttggtcggctggctggaataccgctatggcaatgtcggtatgatggccctgatggtgccgacggtcggagcttcgggtgccgtgttcggtctgctgcttgctttcggcgtaatgcaccccaatgcggtcatcatgctgctcattccgccgattccgatgaaagccaagtggttcgtggtcgtgtatggcgtgatcgaacttttcttcggcatttcgggccggatggacggtgtcgcccacttcgcccatgtcggcggtatgttgtggggattcctgctgctctattattggaaacacaaaggggtgatccgctattgatcgatgagcagggagtattacgacgattacagacacggtgcttcccggaaacgtcggaaaagtttgccgggcagcgtgttcaacggggtgatgctgatcctttcggtcgcgacgggtgcggccatgatcgtaacgctgctggcaccgttcgtgcacccggggcgaacctggatttttccggtgctggggttggtcgctccggcggtttatgtaatcaccctgctggtgacgttgtactggatcattcggtggcggtggcgcattgcccttccgcttgtcgtactgttgctggcgggccttttcaaggtgccgctcttcctgaagccggagttgcgccgtcattacggtgaagagacgagcttcggccggggggcgatcaccctgctgactttcaatgttcgcagtttttataacgaccggggacagtggagtttcgacggggtgacggaggtgatccgccgtgtgaatcccgatattgtctgcttacaggagttcaaccgtacctcgagcaaggccgaagagttggattcgctgttatccgattacgatcgtacggtggttatggaggggaacagacgggatcctgtatttccgctggcgctttataccaaataccggatcctcggaaaatctcattcgatattgggtcctatgaagcaggacgggcagtcggtatgggtggatctgctggtgggggacgatacgattcggatctttaacaaccacttgcattcgaccgcaattaccgtgcatgacgataagtatctttcggagcatcagtttcttacggataccgctggcggagcgaaaatcaagaatatcttccgcaggttccgcgacaacagcatgttgcgggcggcacaggcggacacgatcgctcgggcgatcgctgcgactccgggctgtaagatcgtttgcggtgactttaacgatacgcctatgtcctatacctatcgggtgatggcacaagacctcgacgatgctttccgggcgagcggtaaggggtattcctatacctttcgcggattcatggatgttttgcggatcgattacgtcctctattccgaagatttggagtgtctcgattaccaggttttgtacgatgtggatttgtcggatcactatccggtcgtggtccggttgaggccggtcaaaagatagttgttgttatgattttggattcattgagaaactgggctttttattgcggggccgattcccggttgaagcgggcgttggaatacctcgctgcggccgatttgaatactcttgagccggggcggtacgagatcgaaggagctgaaatttttatgaaagtgacagaaggggagctcaaacgggaagaggaggcttcgctggaggtgcacgataaatatatcgacgtacaggtattgattgccggcgaagtcgaaacgatgggttggcgggagcgtcgggagtgccgtgtcccccgggggcctttcgatgcggaagaagacattcggttttttgcagaccggccgcagcttttcgtcgggatcaggcccggacagttcgtcgttttcggtcccgaggacgcccatgctccgatgatcggtcggggacggatcaaaaaggcggtcgtaaaggtgatgaaataggggcttgtgccgcggtcgcaagactcagaaagagatagaaactaaacagggacggtgccaatgacggcaccgtccctgtttattgcggacgaatcgggattttctaccggattttttcggcaatggctttggcaagtgccgtgcagcattgtgccccctgatcgtcgtatccctgtttcatttctgtcggctggcagatggcctcccatttcattttctgggcgaattctcccagcaggcgtaccgctgctccagcccaggtataggagccgaaataggcgaatttccggcagggaatgcaacgttcgctgattttttgcagcagggacccgacttcggggaagagttcgccgttgtaggtcggagaacccacgatcagcgtgtcgtatttgaaaatgtcgcggatgacattcgaaatgtcggcatacgaaaggttgtaaacgatgatgttttttacaccctgtacggtcagctcccgagcgattttctcggccatctgggccgtattgccatacatcgaaccataggcgatcaccacacccggttcgccttcgtagcgactcaactgatcgtagatacctattacgcgcccgatttcctgctgccatacggggccgtgcgtcgagcagatcgtttcgatgggaaggccgctcagtttttggagggctttctgtacgggggcgccgtatttgcccacgatgcaggcgtagtagcggcgcatctcgtcccagaaatggtccagcgaaagctggctgtccaggataccgccgttcagggcaccgaacgtgccgaacgcatccgccgagaagagtaccttgtgttcggggcaataggtgaccatcacttcgggccagtgaaccatcggcgccatatagaacgagaggtttttttggccgagcgaaatgctttcgccctctttgacttcccgggtgagggtatggatgccgtaatatccgtcgagcatctgaagggttttggcattgcccacgatctgcatctcggggtagagcaggcgcagggttttgatcgaagaggagtggtccggctccatgtgatcgaccaccaggtaatcgatcggccggtctttcaggatcgcgcggatattgtcgatgaactgttcgccgaacgatacttcgaccgtgtcgatcagagcgactttttcgtcgatgaccaggtatgagttgtaggaaacgccgtaaggaagcgaccacagcgattcgaaacgggtcgtggtgcggtcattgacgccgacgtagtgtattccgggtaatatttctgtaaaagccataaattgtttaggttttgattcggcgcgaagatacgaaaaaaatcgtttcgatccattgctgccgaattttatatattataaggtgtcgaataagagcggggtgtaaaaccggtatttttccgctgctttgtcgggcaaatggcttttccgcgccggtcagatcttaaattggtcaatatgggatttgaaaggagataaatccgaatatacgtgctttttttgattattttgaatacggttatttgcttatgaagcaattaatttctatatttgctcggaactttttatttcaaactcaatttttaaattaacgcttatgattaagaaaattgtactatcgttaattactgtactgagtttctgttcgttggctcttgcgcaaaacaagcaggtgacgggtacggttaccgatgagaagggagaacctatcatcggtgctacggttgtggcagagggtacgtctgccggtacgacgaccggaggagacgggcagtttacattgacggttcccgccaatgcgacgctctcgatctcttttatcggttacgaaacccagaaggtgagcgtagccggtaagacgcatatcgacgtgactctcggggaagaggctacgggcatcgaggatgtcgtggtgatcggttatggtacgggtaagaagatcggttcggtgattggttctgtagatcaggtgaagtccgagaagatcgaaaaccgtcccagcaccaacgtcgtggacgctttgcagggtcaggtagccggtcttcagattatgaccggtaacggtgagttgacttcgacttcttcgatccgtattcatggtctgggttctatgggtgccgatacgtcgccgctgattctgttggacggtgcgccgattcaggcttcgacgctgcagacgatcaaccagaacgatatcgcttcggtgaacgtcctcaaggacgcttcggcgacttcgatctacggttcgcgtgctgccaacggtgttatctatgtgcagaccaaaaccggtcgtcgcaaccaggagagtgtcgatgtgacgcttacgggacaatactccatgtcgagtgccgtagcgcctgaattgaatatgatgagtgcgaacgagatgttggattatatcggtgcggctgttgccgttcgtttgtcgggcgatgccttgacgactcctgataagattgcgtccggccgtcaatattttatccgtaatttcggtctggctaagttcatggatgagaactataatcctatgaatgactacaagtggtggaacgagattcttgagagaaatgcgccgatgtatcaggtcgatctgtcggtttcgggcggctcggcgaagacctcttactatttctcgggtaactatgccaataagaccggtattctgcccggttcggagttggatcgttacaacttccgtacgaatatcgataccagggctaacaactggctgcgtttgggcttgaacctcggtttgggttatcagcacagttcggttgctgatacggatgaatcgatgggcggtctgtatgtatcgaacccggtgatggcatcgttgattacgcctccttaccagcctctctatgacgataacggtcagatgctcaatttctttgatgctacccaagccatcaacccgttgatgactgcagactatatgcctcgctggcagaatcgtattacgatgaatggtatggctttcattgaactgactccggtgaaggggctgacgatccgctcctctcttgctgtggatgcttttgactggcgttcacacggtgcgtccagccctgaaactcctactccttcgggtaagttcggtactggtagtgcccgtgaactgttccagcgtttctatgaatggacttggaccaataccgccgagtacaagcatacttggaatgaggttcataactttacggcgctgctcggtgaggaaaccctctatcggaataacaacagcttctctgtagcttcgatcggtatcacctcttcgcgcttcctgaatatcgcgatgggtacggaagtttccggcggtctgccgacctacagcatcgcacagtcagcttcgaattctgtatttggccgtcttgaatataacttcgcagagcgttatttcatcagcggtttgttgcgtaacgacgcaagctcgcgtttcggtgagaacaaccgcaatgcgcttttctgggctgtcggcggtatgtggaatatcaagaatgagacgttcctgcgcgacaatcagactatcagtgatttgagtctgaaagtgtcttacggtacacagggtaactccggtatcggtgactacaaccaccgtcaatatatggctgcgggttcggcttacggcggttacacgacttggatggtatccggtatcggtaaccctgatctgatgtgggagagccagaatacattgaccgtgggtgccaatattgagttgtggagaaaactctctctctcgattgaatactatcgccgtcaaaccaacgatatgctgatgtccattccgttggctccgtcaggtggttacagcggtcgtgccggtaacgtcggcggtatgcgcaactccggtatcgacctttcgttgaactacgatatttacgcttcgaaagactggttcgtgaatttccacgcgactttcaactacaacaagaaccagctgaccgatctttgggaaccgggtcttgaattcgtttatatgggcaacggtctgcaggcttacagcgtaggtgatccgttcccgacttggacaatgcaggagtggcgcggtgtcgatcctgaaaccggtctggatacctggactacggcagacggcggcattacttccaatttcaaccaggctgctttggtgaatctgggtacttcgctttatgcgccttataccggcggtttcggtgtgacagccgcatggaagggactcagcctgacggcagacttctcttgggttcacggcaactacgcgctcaacaatacgatgtatttcgttgctaatgccgatatgggactctcttcccagttcaaccagtgcgacctggcatgggactattggcagcaggaaggcgaccaggcgagatatccccgtctggaccaggcgatcaattttgacagccgtatgcttgagaaggcttcgttcctgcgtctgaagtatatccagttggcttatacgctcccgagccatattatggagaagacgaagttcatcaagggccttaaggtttgggtcggtggccgtaacctctggactgtgacgggctataacggcctggatcctgaggctgcagagaagggtgtcgatgtcgatacttatccgaatacgcgcgagttcactttcggccttgagtttaagttctaattttcagtgttcattataaaaaaataaatacaaggcttagactatgaaaaagataataaattcgattttggcattcgttaccctcttttctgtgacgtcgtgcgacttggatatggaccccgaaacggcgatccggcccgaggatgcgtacaccatggaatattgcgagggtgtgagaggttacgtttatgtggacctgaaagcgctcctttccggtggtttctactcgacaccggacctttatgtggatgttctgaatgtttgcatcggtagcggtaatcagggtatctattctttcaactggcgtttgtatcccactgatcaggatgtaacgtcgttctggtccagttattatacgacgatgatgcatatcaactatgcgatccgtcatatggatgcagcttatgaatatcttactcccgacgagcaaaagaaagtggatgtttacaaaggcgagatgtatttcttccgcgcctatgtaatgcaccgtgccgcgctgcttttctgtgaggactatgatccggacaaggccgctgatcagttgggtcttccctatccgaaagagtgggagccggaagcgaaactggctcgcggtacgttggcaaagttgtatgagaacgtagaggcagacctcgtagaagctgaaaaaaccgtgactgctcagggtactccgacggatcagatttacctgaccaaagatgccattaccgcattccgcgccgagctggcactgcatctccaccagtacacggaggccagccagtatgcccagtctctttatggaacttatcctttggtgacaacggctgaaggtctcgaaagaatgtggcgcgaggatacttctaccgagaatattctgcaactggaggtacttcgtacgaccatgacgactgtgaactcgttcggtagctatctgaacagtagctgggagccgaattcgggggtatacttctatgctcctacctatattccggagcagcatattgtcaagttgttcaaagatgccgatttccgtacggatattttccttgttaagaatgccaatgttacgatcagtggaaataagggggtcggagttcttattggtaagttccgcggtaacaagaatttccagaccaatacgactacgttggtttatcgcaacagacctaagatgttccgtatctcccaaatgtatctggtcgatgccgaggcgcagtatcgtttggaccctgctaaaggtttggatccgctgaaccagttgcgtacggcccgtggtctgacagcccttacggcggatgatgtgaaggatgatgttacgttgcttgacggcacgaagatatctggacttttcaatgctattcaggaagagcgcggccgcgagatgcttgccgagggtacgcgtcttttcgacctgaagcgctggggacaaggtttcaaacgtgatatcaatgccaaacttgctcctttggttgaccaggtgtcttatttgcagactatgaaacagactgctggtagcccgaagttcgtatggccgattccgaatagcgagatgacgcagaacccgaatttcggtagccagaaccagggatatttgtaatagatatctttgatctgacaagatatgtgaaggatcgacccgttacgggtcgatcctttttattttgcgatcatattgaatgaatgggttggtatggattctcctttttcgttgagaggttcagcttctcttttctgacgcggtttggaaatggattcgggattccggatatactgtcgcaggaggattttcggaccttgcagtctgatgcaaataatccggaataatgcaatatgcttgttttttcttggtgataagtgggctctttatcggtcgggatatttttgtcaatgtggtgcgtgtcccggggtgttcgggaaagcggtgatatttatgtgttcgttcgtagcacacttccggattttgttgccgggcacgagcgatgccggtggcgttgtcttttctctcttttgggtatagggaaaagggaggggaggatccgcaaaacagtgtgtcggaggcgggattcaggcttttcccttgcttcgggtaaggccctgcggcagggcgagcgatagccgtgagaagctgacgacggaaccggccagggcaaaccctccggcaagcaacagggcgatatggcagccgttttccgggtcgatatggaacagcagggctaccagagccgctccggtcgtctgtcccgtgagccgggctgttgccagcataccgctggcgcttccgcttcgctcgggcggtgcggaggcgatcaggatgctgttgttgggagattggaacaggccgaatccgaggccgcagagcaggagtcgccagacgatgtcggcgacgtggggttgctcgggcagaaaagccagcagaaccacgcccgccgccatgataagcagtcctacgccgcccatggctcctgcgtggatccgttcgaccagcaagccggcgatcggagccacgaccataatgatagcgggccaggcagtgaggatcaggcccgtatgtacttctgtatatccgaatgtcttttgcaggtagaagggaagcgcgaccatagcgagcatctgggcgatgaacgagcagatcgaggtgatgaccgaaacggagaagatcgggatgcgcagcaggtcgaaggggaggatcggatagggtttgtggagctggctgcgcacgaacagtgtgccgatgaggaccagcaggatgacgcttattccgatatagctgggtttgaggccgtgcgagtaaccttcgatcgaagcgatcagcaatccgaaggtgagggcgttcatcaacccgtcccgccagtcgaagtggcggccccggatgcgtaccgggtttttaggcaggaatcggtagctcaacaaacacgcgatgagtccgatcgggatgttgatagcgaaaagccagggccaggtggcgatggagagaatacccgaagccaacgtagggccggccaccgaggaaacggctacgaccgtagcgtttacgcccattccgcgtcccaggtgccggcgggggtatatcaggcggatcagtgtggtattgacgctcgtgatggctgccgccccgaatccctggcagacgcgggccgtgaccagcgtggcgagagagtcggacaacgtgcagcccagtgaggcgacgatgaagatacccagtcccccgatgtagattttacggtagccgatcacgtcgcccaatgctgaaaacgagagcagggaaaccacgatggctaactgataggcattgacgatccagatcgaattggccgacgagatgcccagcatacgggccatggtcggcagagcgacgttggcgatggctccgtctatgaccgagagcgatacgccgaaagctacggcgaggatggcccagaatcgggtcggcatgggaaggccgtcccactccctgttgccggccagacggggtgctgcaccctgtatcggaatttgttgcagacctgctttcatcgtaaaagaatcctcttgcaaaggtgcggaaaaagccgcgtgcaaggtaaatttatcggcattttgtcgggcgaagtacctaaagcggaggcaaaggtacgaataaatacggtcggatggaccgtccgtcggcattttcgggtgtctggaagcagccggatatttgtgggagaaaacgaccggttcgacgttttgcggggcaggatgtgccggtcagaggattttctggaatgcgatgcgaggatctccggcgtaatgtatttctccgcagcggacgaagccgaatttggccagcaggcggagcatgcaacggttgtcgaagttggtgtctatccggaagctgcctgtgccgcgctcccgggccaatgtcatggtgcggcgcatgaattcggtcgctatgccctgtcctttgacctcctgtgcgacggccagacggtgcaggacgacgtatggggcttggtcgagccacgtgccgtcgatttcggcataggccggttcgccgtcgaagacgacagccccgtaagcgacgacgagtcctgtgtgagtacatagtacgtggccgtatccgcggtcgatgtcgtccgttatatgtgccgccgccgggtagccgttctgccattggcgacttccccgcaggcgcatctgcgcctgggcctggcggatgatcgtgcagatacgctccagatcgtcgggaagtgccgggcggaagagcagactgtctgtctgaaggacggttgtcgttgcgttcatcgtcttgcgaaaaatttttaggaagggacgggtagttcggtcgtgcagggtgcgggacgaaaaagcgttggatttattccgccgtaacgaacatccggccgaagtcgaagacgatgcggtcgaacttttcgaaaaggtccattccgagcgaaccgaaatagggttgttcggatgcggggccgaagtcagctgtgacggtcacctttttcagggtgcgggagccgttgccgatcgtgaaggttatattcttcaggtcgtaacccgtacctcgcaaaattccgccgaaacctcctgcggccgtttcccgctttttcccgctgcggtcgatctcttcgcggtgcagggtgtagtagttcggcgaaagtcccgtgcgggagttgcccgtgtcgaagaccatcgggacggtgtcttttccggcgacgagcgtgttgagaatatattgtcccgaggaggtgtcgtgcatcaggtttcgcccgcttgcaggggtcggttccggagtggcgggcaggagaaagaaaccctctttggggcgaagctcgatctggccggccagacgcatgaagtcggtgccgaggacggcttcgatatggccgatttggtccgaagcctcgtcgttgtcgaagaccatgaagtaggggtggcggatcgtgaccggtccgatctgcatggagtcggtcgtggcgaatttcacgaatccgttgccgccgataccgctcacggaaatcgaatcgcagatgatttcgaggtcgtggcgcttggcgaattccgccgaaacgaagctggcgccgctgcaacccgtgtcgaagatgaagcgctcggtgcggccgccgatcgttatgtcggtatagaagttatggacctttttgtccgtgccgtccagcgggcttttgaccgtttcgcttccgacggtcagcggcagccggatttcgccgtcgggtttcgtgagcgacgtgcgcggatgtcgggccatggtttggaaccaccgttgggtcgccagggtcgaagccctctcttcctcgctctgtccggcagcgaactgggtgagcaggtcggccgcctgttcgtaggcgcccagctcctgcaggttgccgataagcatggagaggagccagccgagcatcgagccttcgggatcggcgaagagttcctgttggtagtcgttgagcagcgtcccgatggcattgcagctctccggcagccggttgaaatgactgcccagagaggcttcgcagagcagccggacgaagggcgacagttcgtcgcggatctccgggtagcatgcttcgagccggaaccactcctgggcgttgatcagagcggcggcctgttcgtcggctgtcggtacggcaggctgttcctctgccgacaggggcagggtgaaaacgaggaagagggcgagcagcagttttttcatagcgtcttaatggttggtatcggtttttccggtcagcgtccgcaggtcgttgcccgaagggttttggaaaacgcgcaggtcgaattcggggatgacggccagcacgtgatcgaatacgtcggcctgaatgccttcgtacgggacccagtccaccgtgtcggtgaagaagtaaagctccatcgggaggccttgttcggtgggctgcagttgccggacgagtaccatcatgttttgattgacccgttcgttctgcctgagatagaggttcaggtagtttcggaagactccgatgttggtttggtgcagtccgttgattttgtcttcaccggaggggatgtcgtgttgccggttatactcctcgacccgctgctgggtccgggcgatgtaatctttcagcaggtcgatgcgcttgtatcgctccagcatttcgggtgtgcagaaacggatgctggtcatgtcgatattgatcgagcgcttgacgcggcgccctcccgaggaacgcattccttcccagttttggaacgagtcgctcaccagcaggtagggcgggagggtgacgatcgtgttgtcccagttgcggactttgaccgtgttgagcgtgacctcctccaccgtgccgtcggcgccgtacttgggcatgctgatccagtcgccgactttgagcatgttgttggccgacagttggatgcccgatacgaaacccaggatgctgtcgcggaagaccagcatgaagatcgcggccgaagcgcccagaccggtgaggaacatcgccggagagcggtcgagaagaatcgagaagacgaggatgacggcgaccaggaaggcgatgacctgtccggtctgcatcaagcccttcagcggcttgcctttccactcctcccggcggcccatcagttgaaatatggcttccagcagggaattgacgaagcgcaggacggcgatgacgatcgctatctgtaccagccgcgtgatcaggacgacgaggccgttttgatcgggaaaggcgatgggcagcatcaccaccaccaggatcggggtgacgatgtggcacagccgccgcaggactttgtcgtcgaagatgatgtcgtcccacgtgactttggtctgcttgacgacgcgtcgcacgacctgcaacaacagcaggcggatcaggaagtccagccctacgccgatggcgacgatgatggccaggatgacccattggtcgatgccgcgggcgctgtccgcagagattccgatgtaaacgagcagttggtcgatccaactccggatggtttgttgcagcataaattcttcggttccgtttttccaagacagggaaaggtgagagcaatcgtgcgggacttgcacgcgaagattgtcgaaccgcttccgatcttttgcaaagatagtgaaagtcgagaagaaaacgggagcttactctcagttttccgaggcgtatcctatcttctgcaaagataatggaagacaagcggcaggccaaacttaattttcagttttctcatccttgcatggcagagttcacgagcgtcctcggcgcatgcttcgagcgtcggttcgtgcaaatttgattcagccctcggttttcactatatttgtatttcgaaatacgatgaaaatgaaacccttgtttatttgctatccccgttgcagcacttgtcagaaagcccttaaatggttgcaggagcgcgggatcgaagtcgaagtgcgcgatatcgtgcagcagaatccctccgaagcggagctcgaagagtggatcgatcgcagcggtcttgcggtcaatagatttttcaataccagcggtctgcgttataaggcgctcaacttgaaagaaaaggtccgcacggctccgcgcgaagagctgatccgcgtgctttcgaccgacggtatgttggtgaaacggcctttgctgatcgcttccgacaagattttggtcggattccgcgagccggagtgggccgcagccttgtcggaaaaaagataggcgtttccggctgtaccgaaataggaagcggacggaaattttccgtccgcaggggctattttttcattttgtcgggttgtcgctcccgtttgattctctttttgcggcggaccgaccagccgaagtagcccagcatacggcccagtgcgaagtattcgccgtgcgaatagacgatggggcgggctttctgcaactccagtttacccgtttcggagtcgatgtagcggctgtcggcctggatattcaccacttcggccagaaacaggtcgtgcgatcctaacggtaggatctgtcgtacgcggcattcgatcgacaggggagcttcggctacgacgggagccttgacgacggtcgccggaaccggagtaagtcccgtttcccgaaatttgtcgtggtcgcggccggaacgtacgccgcaccagtccgtagcgcgtgccagctcttcggtggtgaggttgatgacgaattcacccgtgcggcggatgatgtcgtaggagtgccgctccgggcggaccgagatgtagcacatcgggggattggtgcagaccgtacccgtccaggcgacggtcagcaggttatattcgtcgggggtggcgccgcaactgaccagtacggccggtagcgggtagatcagcgttcccggtttccagttttctttcattgttttcggaggaatcttgcgtgatgttccctgcaaaagtaatcattatttcacaaagcctccggactgttttccgactttgttccgccgatgaacaaccggtaccgcgcgacggcggcatccagcgactcgggggcggtatcttcccataaggtcgtttgtatggtgacgttccctcgtcctgcggttcgtttccaattgccgacgatctgtccgtcgcaaaggatgaccggttggaaaattccgtaggagttgaaggctttggaggtgtgctcttttgcaaggacgtccgaacggtccttgtagccgatcaggtattggtcgtaggcgggcagcagatgcgtcgtgtcgcacggagcggctgccgcagcattgcggaatacgaaaaattccctgtcgccgaaatgttcggtcgtgagttcttcggcgatgctcgccacggcgcggcgggcttcggtcgcggtgagtcccgaccaccaggtgaaatcggcgagcgtggcgggggagtggctgcggaaatagattcgggccagccgggccaacgcctcttcacgggaaggttcttcgccgtgcggagcccgttcgtcgagaagggcgtaggtcgcggtgcccttcttgtcggcgccgctgcagacgatgccgtccgtttcggcccgcatcagcagatgccgcagcgcatattgcgagagcggaatgccccgctgattcagcgcttctccgatttcctctttcgtccggtgtttgttcccttccagcgtcttttgcagcaggttcatgtagcggtgaatcgatttggagtcgagagcggcgtctgtgccccgggcgtaggagtcgttggcggcacggatgcggtcggcagtgagcgagagcatccagcgcaggtctttcgaagaaacgaaatgccacgtcggacgcaacaggtgcgtgcgcaggatgtcgcccctgttcagggcggcttcgatctgtgtggcatcggtcgatgcggtgcggcagccgacggcccatttggccatgcggtagtcctgggcttgtacggctcccatccactccacgacctgttgcggagcgtcgaaaggcggctgaaccaataactggttttgcagtcgtagtgtgatgagaggcagcattgcgatttcgttttatacctctccggccgtggaaaaatcggagcggattctatgattaaaatatattgattcgaattttacgccacaaaggtactaaattgcattcacggtggaggatgttccgtacttttctgtcgaatcgattgggattcaattataaaataggtatgggaatcggcagacaggttgatcgaagaaaggttttgaccgaaaacagattaaatcggatattttttgttctttttgtcgttattgtaatttcaaaacgggaacaaaatttgtcttttacagaataattttttaatcttgttttagaaaggaaaaattactttataatatatttctcttatatagttaaattttaggcactaaaatatgaaaaaaatttattttgggatattatgctgtctgttggggtttacgacaagttgtagcgatgacgacaatgcgactgcattgttgcagatcgatccttcgaccgacctggttttcgaagctgtcggcggtaccaggacgatcgaggttaagaccgaccaggctacatggcaggtggaatcgaatcagacatggtgtaaagtcgaaaagtcggacggcactcatttcacggtgacggccgaggagaatacggcttcggaaccgaagccccaggcagtggtgacggtgacggccggtacggcccaggtggtattgaaggtcgatcagaaagggacggctaccccccccctggcaggaactacatttgaaattacgctcggtgagccgactccgaccggagtgaatatgaaagtggtgccttcggacaacgatgcggtttactattacgacgttctttccaagcagatcctcgatcagcaccactcgggcgatttggccgtatatatgaagaatatgatggcagaagcggtcaagaattacggctcggtcgaagaggctctcaaaaagttgggatctcaaggcgaatcgaactatgcattcgaggggctggatccgaataccgattacctggcttttgctgcggggctcgatgctgcgggcgaagtgaataccaaaatcgagagtaagactttcaaaaccaaggagctggctgcgggagctacttttgaggtgaagttcacctgttattataacggagcggactttacgattactccgtccgatctcgagtttccgtattattcggccatccgtccggcgttccgctaccaaggactcgacgacgatgctttgctccagacaatcatagcggaggacagcttcatgctcgatttcatggctgctccgggcgtatatgaatacaagaacgaaggagtttatctgcccgataccgaatattgggtgctgatcttcggttgggcagccggtgctccgaccacttcgattcagaaattcccgttccgcacgagcaaacccaatatcgatccggcggcgtgccagttcacggtgacccattctgaccttacttcgcgcggaatgaatatatcgatcgagccttcggacgatacggtaccttatatgttcgatctgatctccgaggccgattacgagcggtacaaggccgatatgaaggcttacgtgaccgagtatgtggggcaggacatcgacaatctcgataacaaccgggtgtgcggccagtcgggttacagctatacgaaggtgctcgaaccgggaacgaaatattatgtatgggtggccagcatcgacgagttcggcaagcctcaagcggatgtttatatctccgatcctattacgacgctgcctaaagccgtgagcgatgcgacggtaacggcgactatcgacaaatacttcaacggcgacgacctctatgcactcgataacgagaagtacgcggattgccgggggcaggcctatgtcatggtgacttttgcggccgagaatgcgaaggagtggtacggaacgatggtcgccgaggatccgaacgatccgaccagtgcgatttccgacgacgaggttatcgaaacgttattggtcggcggtacgtggtgtcctaccggcaagctctacctgtgcaaatgggatacggagcatacgattctggccgtaggtgtcgctgcggacgagaatccgggcgtactgttgcgccagagccataccttcaccaaggcgggcgcggctcctgtttccgaattcgtggcacctgaatcccagggcgtgcgtaccgggacaatgaaaatcgctccgcatgtggcttcagtcaggaattacaagtaacaaatgataaaccggatgaaatagttccggttggggttaataaaagttaaatggtgggaaaagcgggcacgtgatgtctccgctttttcttattgatattagaaatccgccggtttttcaatcgctatccgatcgcctgtcgccggatggcggaattcgatccgttcggcatgcagaagcaaccgccggccggctgttccgtacagtcggtcgcccgcgatcggagcattgagtcccgatggatgggccgcatggacgcgcaactggtgcgtgcggccggtcagcgggtagaaggcgatgcgggtgcggccgttccggaattccaacacttcgtactccgtgatcgccggctttccgtgcaggggatcgaccgcctgtcggggacggtcgtggaggtccggtcgcaggggtagttcgatacgtcctttcggcggggttatccgcccctccagcagggcgatgtagcgttttcggacggtccggtgtttgaattgggcctggagatcctggtgcgcttctttggtcagggcgagcagcagtacacccgaggtgtccatatcgaggcggtggacgacgagcggtcccgtagctgcgggataacgctcccgagcccagtcgaggaccgacggagcttccgattttccggggacggagagcatcccggcaggtttgaagacggcggctatccagcggtcttcgtacaggagctccggggcggactgcgggcaggcgcgatcgggttcgggctcgacgtcgagtccccgaagcatgtgggcgagaatcgggccgcatttacctcggcaggcgggatagtagtgtccgtgacggcggatttcgcccttcggcgaggctccccaccagaattcggcgatcgccagcggtgtaagccggtgttcgaaagcgtattgcagcagtttgggggccgcacactcccctgcaccggccgggggtgtaccctgcggagtcggtgcgaatatttccgccagatcgcgtatctctccgagggcgttgagcagacggaacttgcgaaatagttttgcctgaagagccgcagaacgggccttacgctcgcagcgcagggattcgattcgttccgcgatggaggttcgttgcgcgtgaagcgatgcgagccgatttttccaactctgtttcaaccggtgcagctccgctttttcgtattggctttcccggactaaagccgtctgcgtattttcgtccgggtgctccctgcgtcgggcttctcgggcggtttttgcgattcgcatccgggcttttgcggctgcgatttcccgggcgacttctgtttccgtttcttctatggttcggagaagttccctgtagcggccggccgtttcgagggtttcgatttgccggttcaggtccgaaatggaggcctcttcggtgcggaagaaatcaccgggccgcaacatgtcgtagatgggcgggacaaagtattcgtggctgttgctgccggccagattacctgaaaatgcggccagaaagcccacagttccggctggatccttcacgaccagcaccccgaacattttacccgcagagagttcttcggtccactctttccgttcgcacaagtaggctcgcagctcccgggccgctaattcgcacagcggatgcggggtgtagtggaatgggttgttgagccgcgtcggaagcgagaacgaagcgatggagtgtcggaaacgatgcaacatgggtactgtctgcggattcgggtagtcggaccgaaaaaatatttcgggaaaaatggccggagtcgtttgctgcgacttcggagtagtttgttatcgttccgtttcggagtcgatcggcagggagccgatcggttttgtgacgatactatcgaccacgaatttcgagaatccccgccagggaagcgctccgaaatactccttgtagtggagttcgatgtttttgccgcccagcagcatcagcttgcgggcgagcgcttcgttttcgacggaaaattcgaattcgtaggattggatcgtaccggccgttttggaccgtatgccggattggatcagcttgccttcgtaggttttgaagacgagccctttatagacgacatagttcaactctccgcttttgacgccctcgccgaagacgaagaagaagcggatgtagaggaatgcggtcagggcgacgataagtaatacggtgaagacgatccagcgttttttcatgcttgcggcgatttgttccgatgcaaaaataatcatttaatccgattccggtcttcccttcgtattttttccgggaaccggagcggaaggccgggaaacgcttgcgggggcgaatcgtctgtccggcggcatagtccggggtgctattcctgccgaccgttttgcagcaaatacacaatgttataaaaaaagagttgcattgctgcaactctctctcattctgtggtgccaccaggaatcgtaatttatttccaaatagctgaatatcattactttctaaaagcaactcaaccgtaatctcctccgtttgctccaccagtgacttgcgttgttctgcgcaaggttgcgtgaaggtttccaagggcaaaggtagtgaattagtttgaactattgtcattcttgttctttaatcttttgatttctttatcaaaatcgctttcaagcagttccatttcgcgtttgcgataaatggcaaactccttttctgccttctcaatcgcttgtttatgcgaaatatttcccttgccaatcaaaaccttacgcttgtgtgctatgatttggctatccagtgcctctatccaatctttcattgtcataggattcatttccaatgcttggaactcggcaaagtccaagaaaccggaaacaagcagattcagacgttggagttcaatcgcagtcagatagttcttagcgatctttacgtcatctttagttacatagttccccttgaagttcgtcatgcctacaaacggcttttcattgtccacgcgattgtatatcacttcggcagcagtattctcatgaactgcataatgcagtttgttttgtacggtggcaaagaacatctttgtcatctcatcgcgtggatcataatccgtagccgtagcataaatatcggtgacttgctgataaaaattgcgctcgctactacgaatatccctaatgcgttgcagcaactcacggaaatagcggttacccccttgctttaagcgttcatcatccatagcaaaccctttctggatatactcatgaagtcgttgtgttgcccaacggcggaaacgagtagccacttgcgactgaacacgatagcccaaggcaataatcatgtcaaggttgtagtgctctacttctcgttcaaccttacgagaaccttctatttgaactgttcggaatttccgaacagttgcctcctttgctagttctccatcttcaaatatatgcttgatatgctcacttacattcgatttgcttgtttggtatatctcaactaattgtccctgagtcagccacaagtcttcatcagcaaagcgcacagacacacgagttatctcgttatcgtcctgatagagtattatttggttttctttgttcatcataattagtgattatcttttttctttgaatttgaacgataaagcctgtcggtaattacacccctaaatatatcctcattgagaaactctaaaacacggttcaaatctgcaacattatttgtcggtaaaaccaattctttattttcatttatttgtgcattaactccgtatttgtttaataggctagtttttgttcgaggtgcttttctcataaaagctgaaatattgtctgtattcgataacaactttataagccgacgcgtctttatatttgcaatatgctttatactttcagtatttacattaattccatctatttctccaaaggattcaatttcagcatttgtagcctcggtaacaaaatctattagtgagaatatttgatttgcgactgtataactttgaaaatacagtttcccctcctcatatagtgcatgaatcttatcttcaacaataaaagcagagttattcatttttgcaaatatatttccacattcaaactgcaagaccatttttcgttgtaacatgtcttattaaagacctgaaaatagaattttccgtcatcgtaataaaagatacttttaggcatatcttcatttatattgtattcagacatatcagcctgattatatggtatgcgagcaaaatcttcaggtaagtcataatgtacatatgttatattctccccgttccggctaatgatattgccatcgaaaacatcttcttctataccttctggtttaaatatagcacctccatttataaatatatttttaatctctgttactatctcttctttaagagaaatgtgttttactgtattatcggacatcaatgcataaaattggctcatgttatttctcgttaattattaaacccatataatctgtcacttcaataaactttttaatctcattcttatttctgatacattttccagaaattagtatgtaggtattttcttctgtatatacttcataataacgatacccccatattgaacaaagtaaattgtagttattgttattgtaacttgcaatcgcgataaagcagcattgaagtattatgcaaacaaataataccataaaatcaagtttgtcggcaaatattgttaaccaagggattatagatgaaattatttgctccgcactgttcagagataaatttgaataagatttcacttgaatggtttttccttccttgtgtttgttggattttctataaagaaaaattttaataccgataaggcatatcaacataaatccgaaactaatattgatgccccaccattcaaaactagtaggaaatatcttattttctagcatatcatcccatagttgaaaataattcgtgctatccttaataacacctattaatcccagtgacaagaatgttggtgctgttaccgtggcagtgaacaaaaatttagaaataaaacttaccatcagaaaattattttaaagatgaaaataatttatttatctcttcttctgtctcgaatatgggggttgcgccgtattcgccattgaggtaactgttttgaagcattttatcaaaacgcacattatataaattatccattcgtccaaatgaactgataccgttattgtcttttttcatcaaccatatttcatctctcctgaatatcttttgatccattaaagagctttcatgagtggtaaaaatcagttgactagaaacatcttttgaatgcttataaaacaataaaattatttgcttaataagtgatggatgtaagctacgttccatttcatcaacaataaagacttttcctccttgaatcaagtccaagataagtggaatataatcgaataaacgttttgtaccatcactctcatcgccaagcgaaaaaagttcaatgtcagcttcatccatttttttatgcacagtcatcaatttcttagccctaatttcaccatcaatcaagttaattaaatacaggttatcgtcaaatcttaatgctccaaatgcttcatcagtattggattttgataaatctgttttgattgcacgttgtaaatcgtgtggaattccaagtttttcaaattgaacatctattaatttcacaccatcaacgcccgtattgaagtatcttaatagtgccccaaaaccacgttttaagtcgttatcatcagccgctttaagtaatacaccttgtttgtatggtgtgtcgggaaatataattttaagggaatttacaaaccagtcgataactgcatctaaatcttttatatttgatacattttcatgaatgttacgactcataacttcgtggaggaataattgcttttgtggcgttgcttttgctagaaaagaaaggaattgtgattcttcttctttggggttaagcttaagtagatatgaaatttcaaattcagacttttttgtttctctttgaaaaataacacagtcgctgtttttgtttatttgtttaagccattctgaacttatttgttcagaattgtaactaaatccgtattcatattttttgttaccacatagtatgtgataaataatagtggtatctctttttttattttcggaactcaagcgaaatgggtaaaaatctatcaaatcatctgttctcgtgccccttagaacaagccttttccctaactcaatcgcttttacgaaattgctctttccacctgcattcgctccaaacattgcagcagactttaatacccattgtcctttaatgggttccgttttatgttcctttttcaaagtgcctttattaggtagaagagagaaggtttccctgttcctaaaagagagaaagttctcaactataaattgctgtaacatatactatctcattgattatataataaatcggtgcaaatttagagattttttctcagcaaaacaaatgtatatgccaataaatgccaaatatctatattgtaaatgtgaatttttcacatgttgtttgtttgtaagagaaaaagtccatatctttgctgtgtgaattcgaaattaagaccctggcgaaggaccagagaattcgcgctaattgatatgtatagaatatttatatcacactcgtgggcatattcttcagattatgacaaaattgaatcattcttgcgttaggaaggtatcgtcttttacaaccattcagttcctaaaaatgatcctattcacacaaatggcacagacaaacaattatctgatgcaatagaggcaaaggtaaaggggtgcagttgcattatcattcttgcaggagtttatgccacttatagcaaatggattaataaagagattgaaatggcaaagaagtacaacaaacctatcattgctgttcagccatggggagcagaacgcacatcctctatcgtaaaaaatgcagcagatgttatcgttggctggaatgcaaaatctgttgccaatgctgtccgtaactacgccatttatcaatcactataactatttgttacatgaaaaaggcattgttgattgggattaatgattatcccgaaggaaatgaattgacagggtgtattgaggacatcaatagcgttaaagctgcaattgaacgacatggtgacggatctcctaactttggcgtaaaaatgatgccaaatgtacagacttcaggagaagtgatggatgctattcgtaaactttttgcaggaaatgatgatactgctctcttttatttttctgggcatggctatatgaatagcactggtgcagaaattgttatgcctcaagatatagctacccctggtcaatattatacggggatacagatgtcaacaataatgagtattgttaacacttccaaggttcgcaacaagattatcattttggattgttgtcactcaggcaatatcgggaaatacgaacttcaggatgtaggtagcattttaaatacaggagtttcagtcttaacagcttgtcgtgaagacgaagttgctatggaagctggtggtcatggtctttttacagaattattatgtactgcgctaaatggcggagcatcggattattgcggtaacattactattggcggtgtatatgcatatatcgatcgctcttttggaccttgggatcaaagacctgtattcaagactaatgttacggaatttgctccattacgtacagttacgccacaggtatcattgtcaattattcgcgaattaacaaacctgtttacaaatcccaataacgatttagctctagacccatcttttgaggatacgaacgacccatctgtaaatcatgaatatattctcccttatgcagatgcgaacaacgttagaaaattcaaattacttcaaaagttgcagagtatagggtttgtaaaacctataaatgaggagttcatagtaccggatgtcagttgacagagttgggaaagtattattggcgattagtaaatgaaggaagaatctaatatgaagtattttagcgaggcgtattttcgtaacatagcatatagcactcccctttacgagcaacgtacatatagcgataatcttcaaggagcatctctatataaacagtttgatatattcctttcatacaatatttctgatttgaatgttgtaaaaggtatatattacactttgtcgaaaatggggttacaagtatatcttgactgcattgttgatgttgacttgaaaaggaatgaaacaaataaagatacagcaaaaaggttgcagaaaagattaatgagcagtaaatctttaatttatgctcaatcaccagaagctggaagaagtaattggatgccatgggaattaggtgtcgtggatggacatactggtaaatgtatgatcatgcctgttacaaaagatgcgcaacatgcaagtcctcaacgggagtatttacttctctatccatatattatgccttatggtattgaaggacagatgagagtcttcacagagtcatatccttatagtggagaagatcttagttcatatatacggaaataactcataatattaagcagtgcattctcggctgcataattcgagattgacctaaaaagaagattatggcaacaaatccaccgtcaggagacggacatcgcaatggtgcagtaagaaatcgttcacaggtttataatcccaaaactgaacaatgggtaaaaagggataaagatactgggcgttttatggatgtcaaacaagatggtacaccgtttaaaggtgtgcgaaaagaaaagtgagttaaaacgagggcaagagtataacttgccctcgtttatgcttacatcggttttatcattgattcaataaatgagatttcttcgtctgtaagattgtatttgacatacagttgtttgtcaatttgaacagatgaaagcgaccaatcaatatcgctttccttcgagaagtcctgcgtcgggacaaaacggaatgttttggccgtagcatcttgacttgacttcgcttgacagtgcatgaacctcgcaaagcgagatttgagatataggcaaatatttacgcactcatcatacgaaacattggaatctgcgaatatgcaaaggtaagattctgtacaaatttcgttaggctttccaacaaacgcattaagattgtcatcattagcctctgtgccaatgttgtttgctcgaggaatgattactttgaatctatcaatccagttagtgtgcaaaggaacaagattacgttccacatacccttttttgagacctttaccaatacagacaacaggagttgtcagcccatcagatgtttcatgaaaattgggatcgctcacgaaataaccacgcaagccaaatggtctcaatggtgatacaaatgattggatgtattcactactctgttccgttactttggtgatgattgaaatacttctaccatctcggataaaaatatcagaggtattctgagcaaggcttctttgagaagcatatacgccagtttctgtatgagaaattatggtaggtgcggtttttatgttatcatattttgcgtccattaggaaatagcataatccacctttgatcccacattactgaaaaggtctgatgctttcggataatcgtgcaagctgcgaatagttttgtctgatagcatatctgcacgaaagtcatcaagccctcgtcctcctgcataccaacgagcaggcataatcattgaaataaaattgggttgaacttttttagctatagaaacaaaatactgataaactggcacagaacttgcttgtgcgcctccatccataacttgatacggtggatttcccactatcgcattgaatttcatattctttattcctgttctttctgaaacgaatttatcaacctgcttgataaagtgttcaggtttgtttttaatttgattgattaaatcctcaaagtatctggtgtttaccttagccttgcggaagcctatcaaggttcgtttggtgatgctctttgccatgggagttttgcagatgacaaagatgttttctgcgacaaccttgtcccagatttgttgttcgtcttcgatacttgacaccgaaaataaagagttctttactcgtgtacggtaaatgctgtatgccatatagaggggatataatcccgattttgagttgatttcaagaatacgagaatcctcggcaaatacattggcggtcacttcacccttgtcaatgaaacgaggttcggacagtgtggtttcatacccttgttcaaagaagttatatccacccaaacagtcgccaaggtgcatattcaccacacgccaaggagtaagcaccgtttccttatccggattacggaatgtactgaaaatatccgttatgcgctcgatgcgttcctccacgctgagtttgtcggcagcacgagccatagcccggatacgctttccggctgcacagaatatctccgggtcatagtatttcttgatgttgttgaatttctgtttggtaacacccttaggcataaattcttcccacgattgagggtcgatgagcgaagcgaagttgtcaatggtgatttcttgagactcgtctttcaactctgctccataaatcagcaaaggcatacggatggatataccccgaagaatggaaatagcggcttcccgattgttctttttcttcttcagttcttccagtcgttgtttctcctcctctgtcaaaggctgtttgtccttacctttcttcttggatttcttttcaagactttcaagttcctcgtattgctcatcagtcagcccctgattgttgatgtccacttgattcgtcttgggcatggcttttgtctgaccgataatctttttgaggtcatcgaactcttgcaactccaaatcattgagtttcattaactcatcattatacagacttctgtcctcaaagccattgcgcacgacacgttccacatagacctttttgagttgttccaacatccttggcacatcaaactgattcatcttggaaccctcgatggatattatcgggcagaaattcaggaactcgcccataatcttacggtcgttgccactggtctttcctgtcttggatgaaatcttggctgtttctgctatcactttcaatgttctgtccggtgcgaagtcaaagacatagcattgctctttaacctttccgttgatagcggcaggagtctgcacacggaagatagtctgcatataactggaggcagccgtgttatacgagcctgacagcataaacacagctgtccaagccttcacactgacacccgttgtcagtctgccacaagacaaggtaatggtacgtgtggcatcagggtctttgccaatggcttcttctaccgccacaagtgcatccttgctttcttcatcctcatctccattgcctgcaacattcacaaccttgaaatgttggaataccgaatgtgtctgcaacatggcactcatcgcccgtgcctccttcactccaggcagcatccacagggtatgacggaatatattgcggtattcctcattggcaaacggatagcaactctcccggtcctctttggttataagattcaagaaagcacttacatccttgtcatgaacgaaagttccattgtcatttacacggaagaactcacggaagttgaatgccacatcttcgtccacgaactcattgagtaatcgtccgaggtcataggtgtaaatgttcatggttggcagtgatgcgtatggattcgggtcgccaaagtgcagctcatcccaagacgctttggcacgctgttccattacatagtcccaagtatatatctcatcctccttgaaatcgtccaacaaattgaatggagtgccggaaagacgcagaatcttggtcttgtccttcgtaagttcctgcattacagccttacccaaatctgtctgtgtgccttcgtgcgcctcgtccacgatgatacagtcccatgcggtggcgaacacttcattgttcttatcaaagttgccgcctacaagttcagaaccacgcaagtcttgcatggaagcaaagtaaacatatttgcattgtccttgttttgctcttgtttccagcgaagtatgactatcaccgttattctttgagccgtatgcaaaatcccgcctatcatagaatatcttgccaaagtcctcaaaccaaccgctatcaactaccggacggtgggtgagaatcaaggttcggctgaaatccatatcttttacctcctgtaatgcggacagcgtcttaccaaatcgcatcttggcgttccacagcatctggtttcctttcttgaactgctttttagtcttttcaatagcttcacgctgttccggtcggaatacaataggacttttgtcgtgtgaaacctcagcagaagataatgattcacgcccctcttttacggcgattattgcccgtttaactgtttcaagatcggtaataaaccactcgttggctttgttctcggtatcaaatatctttttcttgatacctgaacgctccagcacgctatgcacttccttgtcattgaaagaacacaaaccatacttgctgttgtatatcgtaagttccgtatataagaggtcgtatgctatacctgccgtttgcgtatattgattgatacgtttcttggcagactcgttgagagccttgctgttgggagcaagaccgaaaacattgtcattgtcacaagtggcttcgcccactttcagacatcccttgtgcgcagcatcgttgatacggaacacatatatcagttttaactttagtgaagatgtgaatttcataccgcactattttattaggtctataaatcggattcgttttccctttttgcctgttgccttgtcggtagcatgccaatccttgatttggcaatagaccccattgtgcctgcggatgtcatctttcagacatccttcacattgggtgaccacttcggtagtcccgaacaagtcggctacaacttccctacgttctccgcaactatttggaatgacacctcttaatccgtccatctgccatacgttccacgaaatgatgtaagcgatgtagttgatagatttcagtaaagggcatttgccaaatttctgttgaaaatactccacaaaagagacaagcatagattctcgggcaatgagtagattgtctccctgccactcgtaaccgtaggtacttttataggcttcttgtgcccactcaagccattcgcccgaagtggatgtgttctcgcttaccacccttagtttgcggtcaagcaaaccgatacgctgttccaaagggatagtctctcctgtcgtggtatcatagcggctaatcagatatggggcttctccgcaagtgatttccagtcggatatcacgcacataatccttccaacttttgccctccgggaatatgatacagccttccgttgttttccatttatgatgtccctgttcgtctgcatattcggtattgaaaacatcctttcgtccgaaccatgcttcatcaatcaggttgttctgtgcattgcatatccatgatggagtgaagacctcagccatatcacgggaacgggttgattgggtatcacggcttttgaggacacgaggcatgatgatatgtccgttatctcctgttataaggtgtgggaggataggggaattgtattggtattctttgccaagatgttcataatctgaagtagcccagaagatattgcgttgcatttcgtccctgctcgtggtgtggtctttgagcaaggtgttcagcaattctggtgaaaactggaatatgctatcttccaatatatcaacttcgacaggcattttatatcaagtttacgcccgtctcttcttatggaaataagggaaaaaggttcttctcttggtaagcgttggacggattcgctaaacattcatggtttcacagcaaatccagtattcttttattggctttatctactactgtagtatccagcgatgcaagataaatctgtgtagtgttctcagaatcatgtcccattccctcgcttatgacagaaatgggcacattacggctcttggcgatacttgcccacgagtgccgaccgacatacatagttaatggtattggcaaatccaactgctttccaattttcttcaacagatggttcacacggtgaagttcgttggcgtattgcttccgataatcttcgtcccgttttgtaatgatgggcaagaggtattccgtttcgtttactggatatttgtcaagaatctcttgcatacacttttcccatctgatgaacaactgctgtcctgtcttacgtctgcgataggaaagagtaccattctgcaagtccttctttctcagataagccatgtcgatgaacgacattccccttgtgtagaaacagaacaggaacatatcacgggcataatcaagattgggcttcaatgacaagtccagtcctttgatacgtctgatgtcattgagcgacaaggctcgcttcattgttttctccactcccgtgtaaacggacttgaacggatgtcgttgctcggtcagtccatcttccaccgcacggttatagacggcttttagaatacgcatatagaaggatatagtattgggcgtatttccccttcctttcaaataagcctcgtactctgccaacaaatccgcattaagctggtcaaacaagacatccttgccatttataaaaccgttaaaacttctgagtgcagctgtataagtctctgaggtgcgtattttgcccaagcgtttcagtctcgctatctgttggctgatgtaagcgttgaatgacaattcttgcctgttttcatgaaagcgcatgactacatcatccgttacgaatgtgccggattgaaataacttgtgtatgattttgttcagcctgtccttgtcccacttgatgcgtgaaccgattgaaagcaggtagttgttcctctcttgtcctgtcaatagatgatgcaagacaaccgtttcggaatggctgtcccattccgaaacaaaaagtttatactcggtgtttatctgtctgaccacacggttgtgaatgacctgatagtagagtgtgccctccttaccgtttacggtagatggacggaacttgacctttactgatgccatatcagtcggattttgattgctcccacttagcgtacatctcccttgaaagttccacaatctccctgctcaacttcacaagatcaatggtacaactctccagtttgtaaagcaacgccatcgccttcttctccgaaaaatggcagcgtagctctttgactacctgattgtagttcgtaccaatggcacggaactgggcgtgaaagtccgacagtttagtcgtgtagtccaccatcgtcttgtccaccttcagtaccttgaacttctgcccgaagaagtgtgccttgagaaagacggctttagcgtacacctctgattcctcgtacatcgtgagaaacttgttccattcctcatcatcgaagcgcaccatcacgcagtgtgtcttcgggttcaacttgggatttctcccgtacttgctcttctttttcattcttcttattcttttagtttaatgattcattcatagtctaatctccgattaaagaaccccgaaattatccgactgcggaggataattcagcccacggcggtgcaaggattttcagtcccataattatatttttgaataattatgtgttgtttgaatttttatatgaaaatcaatgttttaagcttccaaatgtggcgattttattttgtttatttttatctatttttgtttgtttttgtatttttgtgtcgaaattgtgtgttgaaataataattatcctatcaaatgaactattcaaaagacggaataacagttgcgcccataatagatacgagtcatccgaaaaagaacggaaagtgccccgtaaaaattcgtgtaacctatcgccgggatcgtcgctattatccgacgggcaaagaccttaccttggatgagtgggaaggtctgactacaacgaaggttcgcgcccttgtggccgttcgtaaagatatagaaagcagttaccaaattgttcgtggggttgttgaggaattggcacgcgacggtattttttcattcgatagcctcaacaagcgattgaaacgttcgggggttgatactcttaaccgtgcatttgcggctaaaatagcggaattaaaagagcaggatcgtatcgggtcaatgctggtttataatgttgttatacagggattggagcggtttgccggggatcgtattgctcttgaatctataacggtggattgggtaagacgttatgagcgctttctactcggagaaggtaagagccgtacaacgatcggaatacacatgcgccatttacgagccatattgaacgatgcttgtcgatgcgatgcgattaaacccgcgcaatacccgttcggccgagggaaatatgaaatacaggccggtgagggccgtaaattggctttaacgctggagcagatcgggcagatcgcccgctatgaggatgggaacgaagcaacggccaaataccgggattattggctgttcctctacttgtgtaacgggatcaacgtcgccgatttcgtgaaattgcggtatcgtgatattgtggacggtgaaatctgtttcgtgcgtcaaaagaccgagcgcacgactaagacccgtaaggaaatccgggtcgcggtagttccccagatgcaagctattatcgaccgctggggtaatactccagcaccgaataactttattttcccaattctcgacgggtcggaggatgcggtgcagagccacgctaaaacaatagccgctaccgggttaatcaataaacggatgcggatgatcggggagcagctcgaaattgggaacatatcgacctatacggcgcgtcattcgttcgctacggtgttgaagcgtgccggggcgaatatcgcctacatattggaaagcctcggccaccaagatctgaagacgacggaaaactaccttgccagcttcgagcgagaggaacgagagaaaaatgctgcattactgacgaatttttaatacgattatttgcataatgcgccgcagtgcagtacctttgtcatatcgtgttattttagttggaatgatcggcggggcacatcttatttccgtcggtcattccgtttttactgcatttctcctcttggatgtggtgaatagcaacaacctcacgcctaaccgacgcactatttcgccggacaaagggtgtttcattttggaacagtgcttacagtgacggagagaatgtccgccaaatggacgatgaaacctggtgttaatagattttgcctttcctgtttcaccttgcgaacgatgctattcttgcttttgtagtttataggcgtgcacgatgcctcatactttgcctcaactccttatgcaacaccttgcaacttattccctacgtactgcgcttttgccaagagttatacggcatcgcgattgatgaacagcgaatcattgaagtgttttttgttttcccctatgaaatacggcaaattcttcgccttttcgattctttcggtgttgtcctcgacccatcgtttgaagttgtcgggcacatccttgacctcattcagcggttcctcccaaaaatccctatccgtgccctcgttggctataattggcactgcatagcacttgcagttcgggtgccacccgatgaatttgaaagatttcggatattttccctccattgcgtcacatatttccagcggcgcacgcccttttttgaagcgcggataccagaactttgccagccactgtacgtgcgattttgatgtttttacctcatatccgacaataaaatcaagttgttgccagcggatactgtcggcttcacgataagcgctgtttatttcggtgcgagccatacgcatagcattctgataagatgaccggtaaacgccttgcccagggtgataagcctgcgccactttcgacagggtaagattgccgaacgcatttcggacacgtcgaaatagtttgtccggctcattcagatagacgcgtacatcacggcttatatcggcagcgcttcggccttcgctgatacctatagataaggataattctatgtgccgttcgaactgcttggcgatactccaaactctttcggataaattatgcccgtaagttgttctacgttgaaatgcctcaagtgcaccgagattgtgaagcatccatccttttttcggattgtcgaatagttgttttacccatgaatcgttcttgtcgttggcaaaaaaccattccgaagtgatccccgctgtaattatagtggacaacttatttcggaatgaagataacgaggcatcggcttgtttactacggcttttgtttgatgagaaggcgaacaatcgccccgtattgggttgatatttatatcccattcccagtcgaatcaattcatccgaggccacatcatacaaagcctctatctgtcgtagatattcttcgacatgcgttttatgctgttgctcccattgggcggctttcaaattcaatccgggcatcgtttcgaattagaatgttggctctataatattgttcatagatgcctctgccttcgcttgctttattcgctcgatttcagcggtaacatcatcggccgttcccattagttcaacgcccttttccagcgacataacgccatcctgcacagcacggcctatagccgcccaacgtgcggtgacatcttcattgaacggttcggcaaattcgtgttctattttgagcgcagccaaatcaggacgcaaatgaatatgggttacattcatcataatagcgagaataagatttttctccctatctacggctatgtcgtatatctctttattattttcgcgcttgatatatcccagtaccatcgcgcgtttgatcgcttcgcccgacaaagttcccagcccagccattttctcgggtgtaaactcgggcgtgaaagtgtcgaacaagatggactgcgcgaggtcttccttttcccgttgctgcgtctcggaagaggtcggtggattgatgtactcgaattttgaatccgctccggtcatccgaatcattttcccgggcttgtcggctcgacctttcaaaaaatctacgacatcgcccgttgctgcggcgatagggtctgcgaaatagttatttgtgtcggatattttgctgtctatatcctcctcgcggtctatgcgggggttgaggcctccccacgctttatcctgtcggtagtagataacattgatttttccggttggattgggagttgcaataacctcccaattaagagatcctcgtttgcatcggtagatcgtatcaggtgtttgaatatcgaaatgctcgatagttgatgtcccctctttaaggtagtacccatacccgaatgcaatgaggttctcgtataggtcgaataatggacgtagggtgtatcctttcgacttgcaaattaccacaacttttacctgcggttggaaattctcgtcccgatagatgtggtagagcttggcacattcagtttctgctcccgcaatgcgttttgctttacgcatggaaacgttgaatcgtgtatcttgcaaaaattgattatatgcttcgaaagcctcgtccgaaccttcgttgttcaccttcttccatcgtatcggattcccgagcagaaagaatagttccacctcattgatgtacttctgtcgtgcacgaggcaacttctcggtacgataaggctcctggcctttccgcatcttatcggcctttcgcataatacggtggagttcggggttatattcctgaatcgcctgcaaaacctccgtatcgcgattctgcataagtgtttgagcctgtgtaatgtctttgtccttgataagcgtaagcagatcacgttctgcaccggttgcattcagatatttattgcgtatcgcattgagtaggttgtctataaatcccatatccgtactttttaccaaattcctaaatcctctttgtctaaatcttcttcattgttgaaatacccccgcttttcgattactccggtcagggcatcttcggcgtcgtcatggctgttgaactcctgctgcttacggtatgatttgacatgcgaggcgaactccggccatttgtgctcccatccggtcggaaaataaataaggttttgcacttcattcgatcgcgtgaaaatacgcacccttttgttggcggtctgcgtaaatgggttgaacgatgtaaagttgttaccgattattcggcactgcgcctcaacattgcgcccgaaagacctgccgccattgttgctctcgacgtagcagatctccgtcttgtttcgggacagcatctcggctgttgccggctcggtatattccatcggtttctgtgtatataaaatgtccgtcacgaaattgccgatgggagtttccgtatagcaaatagaacacagatagtcactgccggtatcagcggtatccgtgtagttctttcgcttcatagatgctgcatatggaattatgtcgtatgtcttaaactctccatacatcaaaccttccagcggcttcgggttctgcatatattgcgtttcaaagacaaatgagttcgatctctcgattttgtgcagttcctccagcgtatgcttaaattcccagagaggctgttcctgtccgttttcgtcatgccagatgcagggcaacgaaagtaccgtccattcctccggctcgatctcctgaagatagccgcatagatcgtgctcatggagccgttgcataatgattatgataggcgtattgcgcgagttcacgcggttgcggatagtcgattcaaagcgattgttcacccgctcgcggatcgtttcggatagtgcatcttccggtttgatcgggtcgtcgataacaatagctcccgcaaaatcgctttcccacgcaggaataaaatcacccatttcgcgccgctccctatacggatcatttacttgacctgcaccaaatcctgtaacctgtcctgctgcacttactgcatacagtccgcctccgacggatgtataccactttttagcattcttgctttcgacgactacttcagggaaaagccgctggtagtagtctgattgtaccgtttcattgatctctttcgagttgtcgagaacaagatcatcggagtatgataggtgtatgaacttactgcgggggtttaacgccagcccgtaggcgatgaagttcttagagacaagttcggtcttgccatatcgtggcgcaatattgataataagacgctttatttcgccacggacgactttgtcaagagcttcgcatattttgcgatgatgatcgccgacaataaaccgcatccccgtcttatgcttgaacatgtaacgggtgaaattcagcataccggaaagacagaaggtacgctctatgtctatgtcgcgaatcggagtagtgcgttaatactcttcgttaagttttaacccatattgtcttgcctcttcgggagagagagtgcgaggtggaataagttcggcaccatctgctcctgtaacctcttgacgttctacatatccccgtttttttccgcgtgttttgagagtgaaaatgatcgctgtttcggagggacgttcgatccaaccggcaaatctcttttcgccattctcgtccttttcgatggccggaacgccggcaaccaatttacgcaggttgctttcggccaaatcaacgaaccgttcacgggaatcttcgagggcttgggcgaattgctcatcatcattgcaccatgtgtaaattgtgctacgctctacacctaaattagcagctatgtctgacaaaataccgccgcaagcatttgcaaccttgcgaaaggtatctaatttcggttttttggagggcattgccattttttatactgtcgtttttgtcgttattcgacccgttcaaccatatccgagaacatttcgccggggattattttgtcgtctggcctgaacccgaaccgaagcatgaatgatgatttcgccctataagacttaaagttgagcattacataggattcgatgtcttccgctttttgctctgcctgttgacgaatctgttctttcatctcctttaccgcggccttgcgttcctcaaacggtcgttgtatctcttcgaaatcacctaacgtatcagacagttctgaacttatttcgtcctgcatgacggatataccgtatatgttcatgtctgcttcagaaaggccagcggctttatagtctatttccggtacaagtacttttattttctccatgtcgaattctcccattgcggagggcgagttcatgaagatattttgttcgcgctctgtcttgtcgtctaactctacagcttctaccttgatctcataatccgtttcaggtgtcccgtcgtaattgttgatgatgtcaagcgtctgtacgcgcttgtgccctgaaaccagataagatgacaactgattccatacgataccgcccagatagccgacagttttaaagttctttttgagcttcttgatgacttcagggtcttctttgcgtggattgtatggagcaaagttgatttgtgatcgcttgattacgaccgtttcactttgcttgtatttgggctgctgctcttttctcttcgtcatatcgcagtaatatatttcgggataaggggaatactttgtaaatcttttcgaggtcttgcggataatgccggcggaggtaatcgaatacctccggcaaaaacgtcagaccttgcgatttgttcttgttgtaggatatgggttcaggcagtttctttgccttgatgtaggccatgacgtccgatttcttccacttggatagaggatataccttgttcgtattgcttatagcttcgttctcgtatccgcgcaacataagacagcgattcattccgtccgactgcttcattccatagaaagagtaagatattcccgtcttcatccggacggattcatcaacgtctttcaacgataacagctttacattggggttaggaatgcagtatagcccacaacgcaaaacacgcgtcaacgtccaatgggggacttgcagtatggtaacattggcataacgagctttgactgctcgcaaatagttgtcaatgtggtcgaggcccttgacgaaatacatgaacacgcaaacgatctctttgaagtgcggagccattaggtcgagcaatacctcgctgtctttgccacatgaataaaaaaggatcgccctgtccgttttttgacggacagaggcaatcacttcgtttgcatggtctatcggggtcatgattaacctgttgccatgccaaaggcggcgcgaatgtcgcgtgcacgaccggcacgattcgtcgcacgaccgcctactgcacgataacgaacacggctagcgcctgtcgtccgattgattcgatttcttactgaatttcgagtgcagcttgaattttagaagtttgacaatatgatttaacctacggaaaggcctcgggcggcagattgcctagctcttgtatatgcactggtcgcccttgcatacctattcgcaataacaccatttcggccacccatatttgcgaggctacttaatcctacagcaggattaggcgtgcggcgtcgcaattcactcgttatacggctgtattgcgcgtcaagctgagttgctgttttttgtcttcgtcttcgagtgcagcaatgattttaagggtttaacaattcattttctcgattaccttgccgaggtggtagtcgatctcggtcatggtatattcgttaccgttgtgctcgtacacaatcggctctttcgtctcttcgtcgcaaacatctaccagctcgacgcctttgacttcgaccagcgcgccggggcgattcttttcgtaacctacccagaactgtatggcatcgtagtggttgataaccgtatcaacgcccttctcgctgtcccacgccgattcgggcacgtcactgtctttcttgtagactttgcctgtgttgttgtctcggtatgaaatgtatttcgtgttggtcgggcgtacttcgcgggtctcgaccgttttttcacccgacaaaatggcgtcgaaccatttttgtttgatgataagcgttaaaattttcatagccgtaaatttcattagtagcgggggcaagaatcgaacttgcgcctgcgggacactaacccgccgtggtaacctctgcactaccccgcatatatctgttcgatgcaaaagtggacacgttcggcacattatgcaaatcttactattgaattatttattaaaaatacgattttttattgagagctgcaatttttaaggtcttttcttcacacaccctttgcagcggataatctcaagcactactgcgtcatatttgacgatcaataggctgtcgcgattgttgtctgcacctttgtaggctttacacccacacttcagccgcgtgcggtgacatgtcgcgtccgtcaattcgaatgcctttttgagtaatgtcaaatcgctgcgtttttctacgtacatcgttggtttcatatattatataacttttacaaagttgaacattctgaatgaccgccagccctcggcaaccgtatcgtaataggttacgaggtgtttgttaggcttacggtcgtcaccttttgtttcggggcataagtcgtccttaagcgtaccgaatgcctgtcgcaattcacccgtactcgatttgaggtagaagaactgcacgatgcccgcgcgcatctttatcttcaatttgaacacctgccatgccttatgcagacactcagcaaaggttacacccgtcgcgcggcacatctgccacgccgtgcgcatgatgatggaaaggtcggttcgtttcattgttatataggttaaaagttggtttttagtttgagtagtcgcaagcactctttcaactcgctgtctgtgtatttcttggcgatctctcgtgatatgccgtttgtgttcattgcgattttgatcgcagcctctctgttcaccttgaaggattttcttgtcttcatagcttttcaattttttcaaatgtaacataatacagcctattgccaacgagtaccattgcgatattcagtttatcgaactgtcctcgatattcaccagtattgcgtccgaatctcaccgggtcgccaatttttatgtctttcatatctttcatttttaccaccggcggcaggtgccgccacgcttcgggcctgaggtctgtttatagccgcccgaacggctttattcgtcgaggtagtagagcagcagttcacaatcttcaacgtgcagaactctcgtaggttcgattttttcgagttgcaaagacagtgtatcgtctttctctgcatagatgtacgcccactggcctttcagttcgatttcttctctggtgccgaaataggcgacagtattatctacgtctttgacaagaccccagctgccattgtccataccatcacgattgattgcgtcgatcactttaaatgcaaatgcgttcatagttctattgttttagacgtttattcaataaatcaattagttgatttcgctgactttgcaaggtgtgaaatacatatctctttcgatgccaagaccaaaggggcgagttctaacgcgttgaagttcattcagtgacacataaccatattctcgctcgcccatattgtctaacaatgcgaagagaatgtagtcgtcgtcttgcttctcgccttcgagaatgtaccacgtctgactgccgcaggggttgaagaacttgcagatgacctgtgccttgccgcctttgccatcttgtgaataaatggggtactttgccaactgcttctcaattgctttagttaagagtttcatggccgtattgtttaattgttgttttgattttttggtgcaaatataaatgatattttgatataatgcaaatattttgagataaaaatttaattgacactaaaattttttgctgtttatatgaatatcaatatatttgtggcaaataatacgtcaaaatgagagttaaagaattattgaaggaacgaggaatgaccgcaaaagagttggcggcgcgtctcggaatgactgaaacggggttaagtattgcaattggtgacaacggaaatccgccgttaaaacgattgcaagaaatagccgatattttgggtgttgaagtgccggaacttttcgccgcttcgaaagagggagcaatcacgtgcccgcattgcgggaagtcgataaccatcaaggcagaataacctcaacgatacctacccatggaactacaacctatccaaagcaagatttacgaaatacggggccagcgggtgatgctggaccgtgatttggcggaattgtaccaagtaacaacaagcgctctcaatcaagcggtaaagcgtaatatcgaacgctttccgcccgatttcatgtttcaactgacagatgccgaaactgaaaattggaaatcacaaattgtgataaccaattccatcacgatgggtttacgccgcaacccctatgcgtttaccgagcaaggcgtttctatgttatcggctgttttgaaaagctccgttgccatacaagtaagtatcgctattatgcgtgctttcgtagcgatgcggaactacatcacgaccacgacgacagtaacggccgagttggccgaaattcgggcgaaactggcgttactggagcgggtggacgccgacaatgccgaggcggtcagcgatctgtcggaagatatgcgcaaggagcttgataatatctacaacgctattgcggcgttgtcggtcaagataccgcaggcacgcaaacccgcccgcaaaattggattccaacaagcggagcaaaaggcggaagagtagcaacgtacccgacgaacacaatcacctgcccgaagtgcgggacggtgctggaggtaaaagaaaaggaataaataaaactacattcctatgacacaaaagcaggccatacagttgttcgaggaccgcaaggtgcgcaccgtttgggacgagcggacggagacgtggtatttttccgttctcgacgtgatctccgctctgacggacaccgtgaatccgaccgattatttcaagaagatgcgcaagcgggatgaagcgctcgcctcgttcgtggggacaaattgtccccagatagccatgaggtcagaaacgggagtgatgcgcaagacgctggccggagatgtgaaaaccgtcctgcggattatccagtcgattccgtcacagaaagccgagcctttcaagcaatggatggcgcaggtggcaagcgaccgcctcgaccaaatgcaagaccctgagttatctattgagcaggccgtagccgattataaacgccttggatattcggatacatggattaaccaacgcttgaaaagtatcgaagtccgtaaacttctcactgacgagtggaaacgcgggggcgttgatggaacgcaatatgccacccttacggacattatcacgaaggagtgggccggacgtaccacgaaagcctacaaacgttacaaggggttgaaaaaggagaacctgcgggataatatgaccaatgtcgaactgctgttgaactcattggccgaggcctctgctaccgaactttcccgaaacgaaaatccaataggtttcaaggccaacgccaacgtcgccaaacggggcggtacagtagctaaagttgcccgacaacaactcgaaagccaactcggacactctgtcgtatcacccctcaacgctcggcaatacctcggaacgttgcccgacaatccgccacccgaaacagcgcaccttacttcagcggtaaaatcgacgaaaccgattacatgcgacacctcaaacgaggaggaataaatagttctcaacttaaaaacacaaatgaaactaaagtaataaacgcatcgaattcgatgcgttttagaatatgaaatgtaatatggaaccgtctctgaatattcgatcatttcgaataggcaatttagtgtataacccccatcttgagcgaattgggtatattgcagaaattacgcgtgcagacatgacgttatttcatggtgagatgctaattaaggaagccggattttatcatgagattttagataaagtagtattatgagatgttaggcctatacgtttgactccaacgttattggaaaaatgcggctttgagaaagaatttagcgactgttaccaacgatttgactactatatcatcccccgtgtgatatgcttatctcctaaaaaagaagggttctgttggcaggtggaagacgaaatcgacgattgcaatgtggatgtgcccataaagtatctgcaccagctccagaatatatattttacattgaccggaacggagctgaatgtagaaaagatatatgatgcgagaatgtaaaaagccgagggaactcggctttctgtttatcatttcaaaccgaccgaatcaaaaatagggtacggttcgatatgtcattttctcggttcatgattgaggcgggattgtgagttgattatcttttttagtcggtctcgaccgcaatacctccaatatcactcggtcaccgtcgagaaccagcatcccgtgccgacggggatcaccaccttttgtgcggtgctcggcctcgcattcggtgcggatccggacacaacggaaacctgcggcctcgaaagccgatccgattaacgataggtcgctgcgtttggggacgcagtacatggggttaattgccgcttcgatgcggcccatgcgttcgatgcgctttttcattttgatttagcaataaaaaactgcgttacgagttgctcggctcaaaatgcaagccgtcgggcgtttccgctaccgaactcgacgcagttaaatttaactgtatgtatagatacaaaatacccaatatggttggatatgtttgtatcgcattttgatttagcaatgcaaatataatgattttgtagggaataacaaaggcgagatttattctcgcctttgttttgaaacatatatcctatctgattactttttttgaagttttatttccagtgttatattatctcctgctacacccatagacacttcggcaattccgtttgagatagaatgtactttgtatctgtataattcttccccgtctatataagtatatatcatatccccttcagctttgtatgttcctgaaccgttgccaaaatacccgcttcccgaatatgtaccattttcataaaatacaacagagaatgcaagatttgtgtgtggcggttgggttatatctatccattcgccgttactttgtatggcaattccctgccatgtgccataaagattctcaatgtcgaacttgaacgattcttgctcatccttttcgcaccccataaaagtaactgcacaaataacagccatcaaaagtaaaaattttttcataacataaattgtattggttagatgctgcaaagttacaaaattcccccccccgcaaaataatgagcctatttttttgaagttgtgccgaaagttccgaggtttgtaaaaacgctgaagctatgatttggatttatattttgctattcgtgattattgcgttgattgtgtatttgatctatcttgttcgtttttggggcagaactaatattgaattgacaggtgatacttatactggattaaacaatgttctgtgtagaatattgaatcaagacagattaaaaaagtaatttactgattttttgcattgcaatccaagtccattcaaaaatagtgtgtccccaaaattgagaggcgcaaatagatatgatagctaatgcaatagcccaatgcgcttcgcgcctacttatttttaaattgcgaagttctaaattatcccgttcttcttgtttgcgttgttcgttatagatgactgcacatcctccctggtctttacacactgataaattagccgcagcttttaaccatattccacccccttttatttcaatgaccatatgatcttcaagaacgcgcagtattcgcatccgttgttcttcatttgggattaatgtnnnnnnnnnncttttatttcaatgaccatatgatcttcaagaacgcgcagtattcgcatccgttgttcttcatttgggattaatgttttgacggcatccatattaaaataggccggatttcttgataattcatttagaaaaacgtcggcaatgttaatgtctcctttttgtagtttggctatcataaggttcattgaatagtaattcaatctgaaatttgcatcggctcctattttttaactcttctttgaatgcttattatcaggtgtctgaattacaatatatttttgtaattcattgatatacattattttagctccaattttatggggggggggatttttgacccctagatctgtcggagcagccggaaagcctgtagaaacgcctgaaatcgacgcaaacagcctatcgtaacgaacattaaggtcttccatcagtttatcggcgacctttacgtcttctttccgcagtaaggtttccagatgcaatatgctgtttagttagttccacgttctattttcggcgggccgggcctctcccgccggatttggggcttcctttatttcagataaaatttaacggttgatatgagttggtccgatagtttgtaaatgtcagtaagtgctgtaattaaatgttttgttcctttcttttcctcgtcaaacgtttcaacatactttttccctccgttgaaatgcaagcccagatactgcgccctccgtagtggctatccgctccgctgttgtcgttggggaaatcattacccgcagcgttcttaccaagcgaatagcgttcataaaatccgcgtagtaggattgaaatacgatggtggacaaaatgtttgtaagagctgttgtatccattgtaggggaccagtatataagttttgtccgctctttaagcatatcttcgatttcttgttgcgtccgaagtgtggcgatagcgattatttcggccacctcttttgatttttcggagcatatggtccacatacgtttaacagcaccctccatctgttcgtcgtcgaaaatcagatcaaggtctattagtcggcgacttatcatcgcgagtcgtccgagttggagggggtataggtaaagggttatttgttctttgtcattgccttcaatctcgaacgattcaattttttcagtcagtgtgtcaagtgcacgttgttctgtaaggcggccgacttcttcttttttcatattataaactattgtttttgctcccgccccgtcctcgagacgtgatgcaagtcgtcagctttccagcgggatagagaatttacaaaacgcccttggtatattccggagttgtaatcggccaccaggaataaccaccttgttccggagctaaaactttcgcagatacttgaatttggagcgggtcggttttattgattccaccacccaatgtcgctacatattttaaccttgcaaaagcgatggagcctccacttttggaatcgaatacgaatgcttttactccttcgtaaatctcgccttttgcaggttctgtagttccgaagtaaaattccatcgtgtcgtcgtcaaaatctacgacattccaagtaacttcttttgtgcctgtcgtttcgtcgattgcagagtaaaatgggtctgcttctccttcccgataaaaatcattactggaaggtatcgcgaaattggtggaaacaccaccattataaggctgactgattttggtgaaagccttcattaagtcggcagcctcagcgtcttttactcctttcgggagaggattacctgcatgaacggctttcagtccgattatttgtcccatgtttaatattttttaagttttactttgaggtttgaaaatgtgtaggagatcccctcctcactaataagagtttcatcgctcacatcaaagaaccagcgttcgttgatagggtagtatcctagtgaatcgaaagcgagacgagttagttcgttcagacggttgcgatcggggtagcgttgctcttcacgaccgattgtcggtgttgtgtccggtacataaatgtttacatttacggttgccacctgcgaatctccgacgacatttgacaatgagcctacgacgataaattctcccgaaggattattcgggtagtggtccgcatacatcatcggcacggtcttccctaacagcgaatcccggatgcgatcccagacgagtttgaatatttccgtagaggtcaggttcatcgctttttcgattttaagaatcgagcgaactccgctttgagtttttcagcagtagattccacccagtttcccgacccttcgagaacgtcgaaacctttagcctcgacatatttcgcgtattccataccggctacccatacgagatatgttttgttagcgggaagttcacgggcgacagaccgggcatgttcaagccctttggcatgagcttcatcggcacctttgttccctttaggattgccgtccggtctgacacggcggttatacttgaaagattcagcaatgattcttccgtattgtaccacaacatacccgatggagttgcgtaggttacccgtgtgatcggtataactaccgtgttcgcgggcgtacttcaccactctttcccccaacgccgacaaccattctacagcttttcggtcgtactcttcttttgctcgcgcaaattcaagttccacctcacgccagttggtacactttacagccataatctcgtgttttcgtaacgttgtccgcttttgtagaatccctgtaccggatacgacgccgtgtccttgtctttcggtttggcctcagtgcggagcgaacggtcgaagatgttgaatcctcggctgtcgaatatgcgtactttcgtcccgataggaattggctgtgtatctgcaggcatcgtaacctcgaaagagtagaggaaggcatccccgttttgccctttgatttgctgtgctcgtccattctgacgggcattgcatcgtccgatgacacgccattcatgcgcaccttcgatccacgaaccatcaggattttgcgaggcgtcctcctcgtaccacatttcgagcgtataggggaatcttaccattggtcggaaatgtcggtaattttcgatcgagtatcgaactcttcggcaatatcgtccagcccgttttcctttgcgatatggaaaatgcgcttttccagtttgtccgtgtacgacaatgaatagcccccgttgctctcactcgcaagaacaatgagatttcgcagaatggcgattgtggcttttgccacgctaattttatcggttaccgtatagtctgcttgagtgtctattccctcgtcaatgcaggccttttctttgaggaaaggatccacatcgtaaggatacagacttgccgatattgcctcgaaattcttcatacaactacgattctacggtcagcgaatagatgccgttgatttcggtgataaccggaagtgacagcgactgtgctttcgtgaactctacgccgttagagttgtcggtttcgcccttgccccactgtgaaatgcggatgcgtccgtagttagagtaggtgacacccggctcttgccgcagctcgttgtcggcataggcgttcttgatgacgcccagtttgcccgcaggtacgaacacgaggttcttgtcgttccacggcgaatactccgtaagtttaccgttatcctgaatacgggtcatgcggcggatgacttcgaatgtcgggaatccgttcgaacgcataaactcgttcaggttcgccagcaacagcggtgtggacgacttgtcactaccgaataccgccaacttcatcttcttgttgcggaggatatacgacaggcgtttctgcgagagcagaatgcggtcgaacgtaactttgtcctgtgcagcatcgaggatggcttgaatatcctccagcgtatcgaccgtatctttattgccatccgtccataacgttttcgcggtggcaatgttctcgctcggcattttgtagtcgatcgtaccgcgcacaccaccctctgggttattggacgcgtcaaacgtgaatacgcctttgttcgacaatgctccgaggaagatgatgtccagtttcgattgcacggagttcacgaccttcgtaacattgttccacatcagattgatgagctgctgtgtcttggccgaatcggacagcatccgcgaatcgagaatctgcaacaccttacgatactcttcgataggcatcgaataagacatctggtgggttaataccttctgcttgatcgtttccagtccctcggttcccatgataggctccttacctttggagtcgagcgttgcagcggcgacgctcaaattgtacgagccgatcaactcctcgaagttcagtccgacggtgggggtgtcccagtcgaggaatcgctcgtaaatattttggtcgaatagccgcttacgcagttcagaggcggcatcgatgcgaatctgcacctgtttagtcagttcgccgaaaatggatgaataaaatacttcgttcattgtttacctcctcttttactgtcgtacatacttgatttcggggttgttcttcaggctgtaaccctgaagccatgcagcagggacgggataggctacatccttgaggatgatacctgcatatccggccgatacggtctggaatccgttattggcggaatagaccatgtcggtttcgacaactgcatcaggcagattgtcgtccgagaggacatctacgccttcagtcgcacccgttacggccgctgcgaacgtgatcacatcgtaatctgcatttttggtatcaatgctttttacggtcgaatttgactcgccgaccttaaccgcatctcctacttggagcatggaacccttcttgacatgtggagcagtggttgtgccgcccgacagaacacgtgcactcttgcatatggaacattccatgttgtcgaagtcgagcttgatcggcgtacctttgggaatctttgtcccttcgggataggttcccttcagtttgaagtcccccggcaatacggcgaactcaccgcgccagaatatggggaaaccgccctttacttttgttttttcaaatacgattgccatgattttacgttttggttactctttgtccggaagtgtttcagcccacgcctttgcgagttctttgccctgcgcttcgggcgtggacatcgggaatcccgaacctttcccttccagctctgcggtaaccagatttttctgcacgtttgcgaggtagtcgccgatcgttttttcatctgcatcgtcggcgatgacgaatccctctttcatgcgccactccggaataccgagttcttttgcctttgcggagatgagattggcccggtcgttcttggccttttcagctttcagagtatcgctctccgctttgatggcgttgtaacgctcctcctgttgcttcttgtaggctttgaaccacgcaggttcctcatcgtcgggttcgttttttttgccctgcccgcccccatttgcaggagatgcctcactctttgccttgagttcgtcatacagtcctttcagtgcgttgtactcggtgcgtgcacgatcagcgtcagactggaaaactttaaggaaaggttcgaccccgctgactgcggtttcaatttgcgattcatcggtgacggatttttccaaaatggaggctactccgtcgagagccttcgctccgaaccccaaattagaatacttggttttcagcgctacgagaattttctctttcatgttttttcgttctatatggtttcgaataaatcatcatattcgcacaaaaaaggtctgtcagccgacgccaacagacccactaacaattacatgaaggttatatcgttctgcaactggtgggctgcgacttcacagcctctgcgacaaaagtcagtatgttcggcacattatgcaaattattttaaggaaaaattcgttaaaaaaagaggagagcaattctcactgtcggaaaatagctttattgaaatgattcattccaaaaagtgcgaaaaatagtgcaagaaggagaggtatcccgcaatgggaaattagattgggtttgtgtctaaattgtgtgcccgactaaaaacaaaccagtcacctacagggctgtaagtgactggttttctgtgtggtgccaccgggaatcgaaccagggacacaaggattttcagtcctttgctctaccaactgagctatggcaccatcatcgactgaaactcgtgtgggtttcgaatcgtggtgcaaagatagatattatttcctgaaaaccaaaaaaacgaccgaatattttccatctcagactttcatttcaggaacggcaggccggaatatcggaaaattttttcggccaggataccggaaattcaggattttggttatttttgtaaaaactgtaaagattatgaaaacaagcagtttgatgatgtgtgcgctggttgcattgacagcctgcggtaccggagtgaagcagagtgtccgtacgcccgtcgaaatgggcgagcggatcgaattgaagacgccggatcccaagatgggactgactatcaacgaagcgcttgcggcgcgcagctcgtcgcgcgacttttctccggagatgctctctctggaggaactttcgggtgtactgtgggctgctgccggggtaaaccgggaggatgggcatcttaccgcgccttcggctatggcgctctatcccattcgggtctatgctttcctgcctgaaggtgtgtatcgttacgattcgaaagcgaatgtattgaatcgggtcatcgaaggagatcgtcgggagcttaccgcgatgcaggatttcgcttacactgcgccgctcaatttggtgtatgtggccgattacagcgtttatgcggaccggaatcagccggtggaccgcatccgtttctggtgcgcggccgatgcgggcggatatacggagaacgtgaacctttatgccgccggaaacggtctgaaggccattacacggggcagcttcaaggaagaggcgctgttggagttgctggggctcgatcccgcacaatacggtgtgattctcgcccagacggttggccggtagtattttcggaaagagtatcgacgaggagttcccggaaacgggtggctcctcgctgcgttttgtcaggagcgggcagactgcaggtccggtaccgggtggatttttcggacgaaccgtgctatcgtcgctttttcctgacaaatgaaaggggaatttcactatctttgacttcgttttggatactccgcctcggcaaaacgcaataaaaatttgcttttgcattcggcttattcgtaatctttgactttgtcttagatacttcgcctcggcaaaatgcaataaaaatttgcttttgcattcggcttattcgtaatctttgacttcgtcttagatacttcgcctcggcaaaatgcaaataaaatttgcttttgcactcggnnnnnnnnnnccgtggaaaattttcgtatgggcggccagctgttcggcgtagttcgaaaaattcggcattacgttcgatgtgcgctgtctttgtattgtaaataacgacgattttatgctttcaaaacccgaacgggagcagataattgctctgataaaacgagaggtcgttccggcgatcggctgcacggaacccattgccgttgcgttgtgcgtggccaaggcccgcgagatactggggacggaaccggaaaaggtttcggcccggttgagtgccaacatactgaaaaatgcgatgggagtgggaattcccggaacgggcatgatcggattgccgatcgcgatcgctttgggcgctttggtcggacggtcggagtatcagctcgaagtgctgaaggattcggatgcgaaggccgtcgaacggggtaagcgctttatcgagcaggggcggatcgacatctccctgaaagagggcattaccgagaaactctatatcgagatcgaagtttcgggcggcggacactccgctgtggcgatcatcgccggcgggcatacgaatttcgtcttcatttcacgggacggcgaaacgcttcaggagagtcgtcgtacctccggcagcgaacaggaggcgcagggcgtcgaactcaacctgcgcaaagtgtttgacttcgccatgaccacaccgctggatgaaatccgcttcattctggaagccaagcgattgaataaggctgcggcagaggattcgttcaagaacaactacgggcattgcgtgggaaatactttgcgccatgctcccgaattgcggattatcggggattgtgccctctcccgcattctctcctatacttgcgcggcctgcgacgcccgcatggcgggagccatggttccggtgatgagtaattcgggcagcggcaaccagggcatcgcgactacgttgcctgtggtcgtttatgccgaggagatcaaggcggacgaggaacatctggtgcgtgcgctcgttttgagccatctgaccgctatctatatcaagcagagcctgggacgtctttcggccttgtgcggttgtgtcgtggcggcgaccggttcgagttgcggcatcacctacctgatgggcggcgggtacgaggccgtttcctttgccgtgaagaatatgatcgccaacctgacgggtatgatgtgcgacggtgcgaagccgagctgttcgctcaagttgatgacgggagtttcgacggctgtgctttcggcgatgctggctatggagaaccattcggtttcgtcggtcgagggcattatcgacgacgatgtcgataagtcgatccgcaacctgacgctgatcggacgggacggcatgaacgaaacggatcatctgatcctgaagatcatgacttcgaaatagccccctcgaaaaataacaagcgtgcctgccttgcggccggtgcgctttttttgtacagaaagtaaagacggtgcggagcgtttatccgttcgatcggaatatgtgcggaacagggcgaatcccgaaaccggtattgtcgggaaaggggtgcggaacgaccggtctgaacgaagaacctattccggctttccgaaaacggtatgcaggacgatgttcgtcgccccttggtgggccgtcgtgtagtctttggcgatgcggctgcattgttgaagcagatgctcgtcgtcgcgcaagggggtgaaccaggttttcaattcttcgtatgagtggatgggcgttgccgctccgagcgttaccaggtcgcgggcttccttgaatttttcgtagttggggccgaaagcgatcggcagaccgaacgtggcggcttcgagcgtgttgtggatgcctacgccgaatccgccgccgatataaccccattcggcatagccgtaggccgaggagagaatacctaccgtatcgagaacgagcagttgtttgccatcgaacgatgtttcggcggtgcattgcgtatagcggacagctcctccgagggtttcagcgagcaggcggttgatgcggctttcgtccatttcgtgaggtgccacgatgaatttgaccgaggggttatcgtttatcaggcggatcagaaggtcttcgtccggtccccaggtcgagccggcgatcaacagacgggtgccgcctttgaaccgttcgatgaggtcgatttttttcgccgcagccgcaatttcggcaacccggtcgaagcgggtgtctccggcgactacgacgttgtcgaagcccagttctgccagtaattttttggaatcgttgttctgaacgaagatcgtgtcgaaactttcgagtgccatgcgccaatagcctccgtaggggcggaagaagatcgagttgcggcggaagatggccgatacgatgtagctgcggatcgagcggcggcgcagctcggtgagcaggttgatccagaattcgtatttgacgaagatggcgatttcggggtgggcgatgtccagaaaacggcgggctttgcgcggtgtgtcgatcggcaggtagaagatgtagtcggcctgatcgtaatttttgcggatttcgtagcccgaaggggagaaaaacgtgagcaggattttgtattcgggatgttccttgcggattttttcgatcaggggacggccctgttcgaattcgcccagggaggcggcatgtatccagataatgcgagccgaggggtcgatgctctctttcatgcggcggaagagtcctttccggccgtcgatccagagtttcgcctttcggtgccagggtgaggccaatgcaatggcccaaacgtagagtaccagccccaaattatagatccacatccgctttcgttttgtgcgtctttatatcgcggatgcaaagataagataaattgtcagaactgccaaattaccagtggagttcgatggcgtcttcgatatagcgcacctccggtgtgcctgcgggggcggtttcgactgcgatcaggtcgaattgcacctctcctgcgaacggattttctgtcagataagcatttgcggcccggacgagtgcccggcgcttgtgcgagtcgagtgcctgttccggcggggtgaggccgtcccgccggcgtgtcttgacctcgatgaagtggagggtgccttttctggcagcgacgatgtccagctcgtaatgtccttgccgccagttgcggtggagcagggtgaatccgtggtcgaggagccaccgggcggcggtctcttcgcccagccgcccggtatgctgtgtcgtggtcatcggttcgtcggagaaagctgtcctgttttttcgaaatattttttcatgaccagcagcgaaatgaaccgttcccggcgactgtcgtagaattgtcgtgcgaagtcgttcgcatggtcgatgatctgttgggcctgttcggggtgcgcgatgtagtaatcgatcttctcctccaggtcggagtagtcgtccctcacttcgatgtagtggtagccggggcgcaggcgtccttccatgaaccaggattcgttgcgaggccggggcatcacggcgatcgaattggtggacatgacccaccggatgttgctggcgatgtcgttgccttcgaacgtcatgatgaacttcgaatcgaggtgggcgtagagcgtgatttgttttgctgtacctgtttcctgggcgctgtgtccgctgcgggtatccgccgtgtcgatgcggggattgtcccggaatgtttcgatgaagcgccgacgctgctcgctactcttaaccgatccccggaaaatcacccggtcggctttctccgtaaacggaattttgtcgtgcagccggatatctaagcggcagcggtccaagttgagcaatacggagttatctcctttgccggaagcggcttctcccccccccggtcgatttttcgagccttgatgatcgtcggatgaagcaggtcgaaaactccgtcgccgaaataggtctgccaacgcagggaatcgtcgaaaaaacgggtggtttggtaggagtcgaaaatataggcgctgtgccggcccctgaacttgtgttctttcaggggtgtcgcttcggtcggagagaggcgctctgcgccggtcaaacggttgtagtaattgacgcggtcgagcacatagtccatgtcataacgtttctctccgtcgcgcagaatctcttccaaccggctgcggaggagcaccttcggtacggcataacgggatagctgggcgatgaagtagggcagcttgatgttcttgccgccgtgcagtcggttgagagcggtcattaattccatacttgcgaatacggtttgtcagggattgcggaaaatacggggcataccataattataataggaatgacaggtcgtccccggctttcacctcgtagggggcgatgcccttcttgaaaatacgcatcggacggctgccgatcagttccagttttccgttttcataatgaagcatgcagccttcgcgcaggccgacgacgtagcggcgcggattggccgtgatgtactccagaatacgctgctcgcgggtctctccggcgtgaccttcggggttggcgtccaggtagtgggggttgatctggaacttcacggccccgatagccttgaacgattccggttcgacgatgggcatgtcgttggtggtgcagatcgtcgggcagcagacgttgctgccggccgaccagccgatgtagggcgtgccggccttgatcttgccgaggatggctttcaacagcccctgctcctgcattttcttggtcagggcgaaggtgttgccgccgcctacgcagatggcctgtgcctcgcggatcatacgccggggatctttcgaacggtgtacggaacgtaccttgatgccgtattccgcaaaacgggcctgcactttcgcttcgtattcggcgtaggaaaaggtgatgcctgcataagggacgaaaaccacttcgcggacacttccgaggaactcgtcgatgcggggcatcgggtatttcagatagggttctccggcgttcgtggagttggaaattaacagtagtttcataaagtattgatttatattgtgttatattgaatacgcgaccgaagaacggcaatttctttggttgtaatgtcaaaagtaataaaaaaagtgttatttttgtgcgattgtttgatagaaagaatttcaatttttaataaatgattgtttaactaaaaaattaaaattatgtcagaagtacagtcaaaagttgtcgagatcatcgttgacaaattgggtgttaaagagtctgaggttactccggaagcgagcttcaccaaccacctgggagccgattcactcgacaccgttgagctgatcatggaatttgagaaggctttcgatatccagatccctgacgaggatgcagagaagatcgctaccgttggcgacgctatctcctatatcgaggcacacaagaaataatttacgatttttccaaccggcaaaccttaaagccttaaatttatgacagaaagacgagtagtcgtgacgggtatcggtaccatcaacccgctcggcaataatattgcagagtttttttccaatctcgaaaaaggagttagcggcgccgcgccgattactcattttgatgccgagaaatttaagacgaagttcgcttgtgaagtaaaaaattacgactggacgcagcatttcgaccgtaaggaggtgcgtaaatacgacctcttcacccagtatgccctcatcgcggccacgcaggctgtcgaggattcgggactcgatctcgagaaggaggacttggagcagatcggtgtgatctggagttccggtatcggaggacttaagacgttcttcgatgagtgtttgggctacgccgcaggagatggaactcctcggtttagcccattctttattccgcgcatgatcgccgacatcgcggcgggctacatctccatcaaatatggtttcatgggccccaactactgtacggtttcggcgtgcgcttcgtcgaatcacggtctgatcgattcgttcaacgccatccgtttcggtgtggccgacgtgatggtcgccggcggttcggaggctgccgtcaatgaacccagcgtgggcggtttcaactccatgcaggctctctcgacgcgcaacgacgatccggtgcacgcttcgcgtccgttcgataaggatcgtgacggtttcgtcatcggcgaaggcgccggtgcgctgattctcgaagagtacgagcacgccaaggcacgcggtgcgaagatttactgcgaaatggtcggcggcggccgttcggcggacgcttatcactttacggccccccatcccgaaggcaaaggcgccatgaaatccatgcgcgacgcgatcaaggatgcgggtatcaaacccgaagatatcgactatgtgaacgtacacggcacttcgacacctgcgggcgatctgcccgagctcaaagctctgcacggcgtgttgggcgatcacatctacgatgtcaatatttcatcgaccaaatccatgacggggcacctgttgggggctgccggtgctgtcgaggcgctggcctgcatctttgcgatcaacaacggtgtgattcccccgacgatcaacaacgaaaacctcgatcccgaaatcgacccccgactcaatctgacgctcaacaaggcgcagaagcgcgatgtgaagtgtgcgatgagcaatacgttcggtttcggcggtcataactcgacggttattttccgtaagatttaacacctcgtccgtgccgtgtggaatttcgtacgccgtgccgtaagaagaaattacgggcaggataaggagtattacagaattatcgatgagctgttcggattcgttccgcacaacatcgaactttacaagctggctttgattcacaagtcagcttctttagttttagccgacggacggcagatcaacaatgaacggctcgagtttttgggcgatgccgtgatcgaagccgtgacatcggactatctttatatcgaatttcccgaccggcaggagggatttcttacgcagttgcgctcgaagatcgtttcgcgccagtcgctcaatacgatcgcccggacgatcgggttggaccggtacgtgatcgccaacccgaccggaagcaccaaccagaaacatatctacggggatgctttcgaagcgatgatcggggcgatctacctcgatcaggggtatgagtttgccaatcgattgcttatcaacaatatatattaccgttatctgaatcttgacaacctgacggacgaggagacggatttcaaaagtcggttaatcgaatggtgtcagaagacgcatcatactattgctttcgaaacggtgcacggccggaattattcgtcgaatcatccgatattcgacgctacggtcgtgatcgacggtatccgtgtgggacatgggcagggcgagtcgaagaaggaggccgaacaatgtgcggcccactccgtgtcgtgtgccatgagcgacgaggcatgcggggatattttggataaaatcgaccggctctaccagccgaaaggaaccggggtgtcatgagtgaagcgtctgtaaaactactttcccggggcgttgaaacgctgaccgatcaggagttgttggaactgttgctggacgacggtgattcggagcggcttgccggggcgctgctgtccagtttcgaagggcgactcgccgcattgggatatgccgacatcgcgcggttgcgtatggctgccggaatcggcctcaaacgcgccgctcggattcaggcggctgtcgaattgggccgccgggtgcttgctgccagggagttgggacccgatccgatcggttcgagcaacgatgtggtccgaatattcagacccctgctgacggagatgaagcacgaggagtgctggtgcctgtacctcaatacgggcaaccggatcgtcgagcggcagcgggtaagccagggcggggtgcaggcgacggtggtggatcaccggttggtcatcaaacgggccctcgaactgctggccacgcagattatcctggttcacaaccatccttccggtgctgccttgcccagcgagcaggataagattctcacgaagaaaattgccgaggcggccgcgctgttcgatattcggctgctcgatcacctgattatcgcacggggcggtgagtacagtttccgacagaacgggttgctgcaatagtcctggctgtgacgaggctgtctgcccaatccccgaaattgaaagttgcccctgccggataaactccgacaggggcgaaaacattaaaatcggacgtgttagacagctttttgttctgccgctgcggtccatcgttgcgcaggttgtgggcaggaagagacgggaccatcgtaacggggcgtgcgactctttaatcgttgcgggaagagttggctgtggattatcgtcttccgggttcactttgttttgtcgtagaaaggtttttcttccgaagggagaacgtaagtttagactgccgggaaatttttgccgatctgtgccgtatttcttttttgaggaagagcataaggtgaatcttttttcgaatgatcggaaactctgaaataaggactgcaagtcgaacgaatggacgattatcccggagatgggagcgaaatgaccggaccgggcatcggtaacgaaaagcgaggaatggcaagaacctttcctcgcttttcgttgccgggtgcgcacaggctggccgcaaagtacgaatttctaattttggaggtcgaagcggcggaattgaatctcgaatcgacagacgctctcccgctcgtcgcttcgggtcgtgcgggtaatgatgagcggtgtcgcaatttcagcatcgtgtgcgactgtctgacgcgtgtattcgaaggtctgggtcgtaaccgcgtcgtcggaacgggtcgtgaccgttcggaaaagatcgttgttgagactgctgaagaaacccagtccgcgcaggatatccggttcggcaaccagcagcaggaccgggtcgctgttgaggaggggagtgccttccaattcgtagatgaaatcgctccaagccgtcgtttcatcgtagtcgtaaccgtactcttgccggaatgtttccgtatttggctcgttctcgagcgttcggatgacagcactgcaattatcccaagcctccagcggaccccagggatctttttcccattcgtatttttcgcagatgggttccaaagtcagggaattgtaacgcgatatggaggtgagtttgtcggagttgaaggtgccggtgccgtatgtgcaatcgaagccgtacgtttctatttcactgccggaaagtgtcgaggtgagttcgtatcctccgcttcgtacatcgcagaagtagccgtatagggttccgtctgcagtttgcgtataaggttgctcgccatcgatttcccgggtgaaggagaatcggatgcaatcgtctccctcgtaggtgaactgccatgtttcgacgggacggagcgtgccgttcttgtccgctgcggatattttgaaacccgtgatacggcactccttgctgaattccgccggaagttcataagtatattccatttcagcaatcagacttcccgaagcgtcgcgcccgacgatcttgtgcagttgccaataccgaacctgttctccgatgttgggttcgtccggttcattggtatcctctccatcggttcccgactgggtgatggtgatgagaatcgagttcgtgccgcaggtgatttcgataaaggccgtgcgggattcttcggcggtgttgggatccgtttcgacgcggatgtcgtaatcgcctgccgcatctccgtgatcgggatttatgcgtacccacgtcggggcttcggcgcgggattcgtccgtgatggcggaattccaggcatcgttcgtcgaaaagaaaatttccgaattccctgcggtttgtcctgcggggatcttctgggagagctgtcgtgtatcggggacctgaatggagccgaaatctccatgccattcatccgttgtgtcgtcgctgcaagccgtaatcgcgagggttgcaaacgtgagaagaagaagtttcaatcctttcatttgtgtattttttgatggttattcgttcgggtacgatgaatatgaaacagatgtatttgtcttccgctccggatatttccgaattttggcgtaaagatagaaaaaacggttcggagtaccttacattcccatttattttgtacttttgtttttcagaaaatagtaaatgcaaaatacgatgactcaggaagaacttttcaaaaaactggtagcccactgcaaggagtacggcttcatctttccttccagcgaaatatacgacggactgggtgccgtgtacgattacgggcagaacggcgtcgagctgaagaacaatatcaagcgttactggtgggattcgatggtgcgtcttcatgagaacatcgtcggcctcgattcggcgatcttcatgcatccccgcacgtgggaggcttcgggccatgtcggggcgttcaacgacccgttgatcgacaacaaggattcgaagaagcgttaccgcgccgacgtgttgatcgaagagtggctggccaagcaggacgacaagattcagaaagaggtcgataaggcgaagaagcgcttcaaggagaacttcaacgaggagcagtaccgctcgacttcgccccgtgtgctggagattgccgcagcgcgggactccgtgcacaagcgctttgccgacgcgttgaacgccaacgatctggaagagctgcggcggatcatcctcgactgcgagatcgtctgcccgatttcgggtacgcgcaactggaccgaggtgcggcagttcaacctgatgttctcgacccagatgggatcgacggccgaaggcgccaatacgatttacctgcggcccgaaacggcgcagggtatcttcgttaatttcctgaacgtgcagaagaccggccgcatgaagctgccgttcggcattgcccagatcggcaaggcgttccgcaacgagatcgtggcgcgtcagttcatcttccgcatgcgcgagttcgaacagatggagatgcagttcttcgtccgcccgggcgaggagatgcggtggtgggccgaatggcgcgatacgcgtatgaaatggcatcgggcgctcggcttcggggcggataactaccgtttccacgaccacgacaagctggcccattacgccaatgccgcgaccgatatcgagtacaatttcccgttcgggttcaaggaggtggagggcatccactcccgtacggatttcgacctgtctaaccaccagaaattctcgggcaagaagatccagtatttcgactccgaaacaggcgaaagttatgtgccttacgtcgtggaaacctcgatcggcgtggatcgtatgttcctgcaggtgatgtcggcggcttataccgaggagaagctcgaaaacggcgaagagcgcgtcgtgctgcggattccggcggctcttgctccgacgaaggtggccgtgttgcctttggtgaagaaggacggcatgcccgaagtggcgcagcggatcgtcgatctgttgaagtatgatttcaacgtcgtgtatgacgagaaggattcggtgggcaagcgttaccgccggcaggatgcgatcggtacgccgctgtgcgtgaccgtcgatggccagaccctcgaggataataccgtgacggtgcgccaccgcgatacgatgcagcaggagcgcgtggcgatcgatgccctcttcggactggtcgatgcggagtgttcgctgcgcagcctcctcaagaaattgaatgtctgacagggctgtcgcgggtttcgcgccgggtgcgtcggacggcgagtacagtgtgctttgtatcggggatgtccgtgagggtgtgtgggccggtgttgttcgagctattggataaggtaagatcgtgggacgtattttggccatagattatggaacgaagcgcacgggaatcgccgtgagcgatcccttgcggatcattgccggagggctcgaaaccgtcgaaaccaaagggttggaacgctggttggcgcaatatttcgcggcgaatgacgtttcgaccatagtgatcggaaagccgatgcaaatgagtggcgctccgtccgaaacgtggcgttacgtggaaccgttggcggcccgcctgcgcagggcctatcccgacaaggaggtggtgttttacgacgagcgtttcacctcggtcatcgctcaccgcacgatgctcgagagcggtatgggcaagatggcccgccgggacaaggcgcttgtggacaagatatcggcgaccattatcctgcaaggatatatggagagccgaagttagttttccggctgcggccgggttaaaaatggaaaaagttatgatttatccgatagttgttttcggggcgccggtactgcgcgaaaaatgccgggagatcggacccgattatcccgaagttaaaaagttgatcgaggatatgttcctcacgctcgaggaggccgaaggcgtagggcttgcggctccccagatcggtaaaagcatccgcctgttcatcgtggactgcacgccttggggcgaagaccatcccgaactggccgattaccggcgtgcgttcattaatcccgaaatttacgaagtttccgaggagacgaaactctacgaagagggatgtctttcgctgccgggattgcacgagagcgtgcggcgttcgcttgcgatccggatgcgttatctggacgagaatttcgagccgcacgacgaagagttcaccgggctgccagcctgggtgatccagcacgaatatgaccatctggaaggagtcgtcttcacggatcgcttgtcgcctttgcgcagaaatctgattaagagtaagttgatgagcttgacgaagggtcgttacaaatgctcgtacaagactaaatagggggcgttccggtaaaagttacgggattgaccgaaaagagagcgacattggcctaaaagttgaaattttccagagaaaggggtaaactccggaaaatttttattacctttatatattagaaataggacatataatattttatcattttaaattttcatacgatgaaaaaacttttacttacattggcaatgggcttgctcgcgtggtcggcatctgcccagaattggacggtcggtggtcgtatcggatccggtttccaggctgtcggacagtatgtattcagcaacgataattatgtggaagcccgtttcggtgcttattgggccaatgccggcggtacggtgacggctgatttctcggtattgtataattggaatgtttgcaatatggattggacgccgtcggcaggtcgttggttcttcgatgccggtgcaggtatcaatgtgggcggcaaagggcattacgcttatgtaggcgtggccggctcggctaaactgggtattgccttcaagggggctccggtacgtctttcgttcgactggtcgccggctttcggtcccggaatcgcttattgggacgggggatcgcattccgagttcaacgaacgggcattgtgtaatttcggtattacgtgcgtttattgcttctaaagagagaactcgaggaaataagaagcccggagcaatttgctccgggcttcttttatgctgtcggttcggtgttttttctgttcgatcatttttccctttgctgatgaagaacgttttccgaggggcggaattgaggggactgaatacgtaatatgggtccggaacggttgcggtcggaggcgaaaaacgggctggactttcgggtattcagcgacgtgtgtaggattctccttggaggctgtattcgtttataccggattcgtttcgggcgccgaaactttattttgctttgggcggcctctttcttggatgcggtcggaaccttcattattccagtatgctcttttcggaagggagggtgggcatgtacaatccgcgatcccgaagcatttgaatcgcaggtctgaatggcgataaacgccgtgtttttccgtcagaatgtgaaagttccgcccagggagatcaggatcggattccgtgcgaacatggctgtctggaaacggtatttgaacatgagcgatgtactccagcggcgggtgatccggtagtcgcagcctccgcccacatcgaagccgcaggaccatttgcccaagtcgttcacattgacgccgactgtggggaagaggctccattgttcggttatgtggaagagataatgggcgtcgcacccgatgtccaccgaacattccgatttgcagggaatgacgattcccgtttccagccgcagcgcatcggtcaggctgtatcggaaatagccgccgatgccgaagacggcgccccggccggtatgggtgtagagattgatcttcggacctatgccccaggaacctctgtcctgtgccgatgcgtagaaagcgctgaataagataagtattgccagcagtgtttttttcatagcttttgcagacttcgatacggcttttgccggaatgattccttgctgccgtcggataatttagattctctcgaaaacaaagatacgaacgaaccggccgtatgagcaaatttatatttgcactttgccgaggcggagtacctaagatgaagtcaaaggtacgaaaaatttccgtttcgccgaatcctggggagccgaatgaaaatggagatactctgagatcgaacagtatttgtcacaggatcgtgtgtggggtttatacgtgctgtattttgaaaattattttttatgattaaagaggcatgtggtggttggtttgataatggacggtgtcttgttcttttttgtaaataatttgtgtgtgtcgttataatgttgtaaattacatgggaataaatattttacaaacaatccctcctaatgtttcgattatgaaaagactattattcggtatattggcaacgttgccgctggcgtattgtatgacgggatgtagcaacgatacagactacggaggttttagttactttatctgggccaatgacagcgatcaccggattacgctctccgtggcacgcgagtacggtgagttggtaatcgaaaacgaaatcatagagccgggcgaaagttttgagagcgaaagggtggatggggcaatagcatactgtccacctccgtcgagctatatccggtatgtggaagttgtctttgaggatgggactaaagcgatttatatcaaggggtatcagccgccgcgcgattccgattattattcgaggcaggactctaccatcgattggaattatgaggaggaggtaacggcatctcatgcggtcagaacccgttggacctatacttttaccaatgccgactacgatgcggcggtggcgcagcaattcgctgaataggagttgccggtcgtggttataaaaatcctcccgaaccgatcggttcgggaggatttcgtcgcatgtatatcgttttatgcctctttgagagccgcatgcgctgccgccaggcgtgcgatgggcacgcggaacggagagcagctcacgtagttcagacctgcgaagtggcagaactccaccgacgaaggttcgccgccgtgttcgccgcagatgccgcatttgaggttttcgcgtgtgccgcggcctttgaataccgcctcgcggatcaactgtcccacgccgttgcggtcgaggatctggaacgggtcgttcttcagaatgcctttctccaggtagatcggcaggaacttggcgatgtcgtcgcgcgagaagccgagcgtcatctgtgtcaggtcgttggtaccgaacgagaagaattcggcgacttcggcgatctggtgggcggtgactgccgcacgcggaacttcgatcatcgtgccgaccatgtattccaggcggtcgttacgttcggagaagaccttctcggctgtctggtcgatgatgttcttctggtaacgcagctccttgtggttgcccaccagcggcaccatgatctccacgtgtacgggaatccccgttttctttacgttcatagctgcctcgatgatggcccgggtctgcatctcggtaatttcgggataggtgttgcccaggcggcagccgcgatggcccagcatcggattgacttctgccagcaactccactttggccgcgatcttttcgtagggaacgttcatgtccttggccagttcgcgctgttccttctcgaagtgggggacgaattcatgcaaggggggatcgagcaggcggaccgtcacgggatggccctgcatcgccttgaacagaccctcgaagtcgctgcgctgcatcggcagtaacttggcgagtgctacgcggcggccggcttcgtcgtcggcgagaatcatctcgcgtacggccttgatgcggtcgccctcgaagaacatgtgttccgtgcggcaaagaccgataccttcggcgccgaacataaaggcctgcgccgcatctttcggcgtgtcggcgttggcgcgtactttcagcaccgagtatttgcgggccagctccatgagctgtccgaagtcgccgctcagatcggcggcctgcgtagccacctggccgagataaacttcgcccgtcgaaccgttgagcgaaatccagtcgccctccttgatttcatatccgtttacgcggatcgtacgtgtcttgtagtcgatctgcagctcgcctgcacccgatacgcagcacttgcccataccgcgcgctacgaccgcagcgtgggaggtcatgccgccgcgtgcggtcaggatgccggcggcgtcgagcatgcccttcaggtcttcgggcgaagtttcgatgcggaccagaatcgcacgttggtttttctccttgagcattttttcggcatcttcggcgaagaataccaccggaccggtcgctgcgcccggcgatgcgggcagtcccttcacgatgactttggcgtttttcatcgccgtcttgtcgaaaacggggtggagcagctcgtcgagtttggccggctcgcagcgcagtacggcggtcttttcgtcgatcaggccttcgcgcagcatgtccatggcaatcttgaccatcgcggcgcccgtacgcttgccgttgcgacactggagcatccagagtttgccgtcctggatcgtgaattcgatgtcctgcatatccttgaaatactgctccaggtggtgctgtatctcgttgagttctttatatacggccggcatcacctcctcgagcgaggggtatttgctgcgacgctcggcttccgatacgttctgtgctttcgcccagcggcgcgaaccctcgatggtgatctgctggggagtgcggatacccgctaccacgtcttcgccctgcgcgttgatcaggtattcgccgttgaagaggttctcacccgttgcggcgtcgcgcgagaaggctacgcccgtcgccgagttgtcgcccatattgccgaataccatcgcctgtaccgatacggccgtgccccattccgccggaatgttgttgagcttgcggtaaaggatggcacgctcgttcatccacgaaccgaatacggcacagatagcgccccagagctgatcccagggatttgccgggaaatcctcgccggtctgtttctttacggctgccttgaagttgtgcaccagctccttcaggtcgtcggtcgtcaggtcggtgtcgtttttcacgccgcgcttctctttctgcgcatcgatcaactcctcgaacggatcgtgctcctctttcgaagcgggcttcatgcccagcaccacgtcgccgtacatctgtacgaaacggcggtacgagtcccatgcgaaacggggattgcccgtgcgcttggctacggcttccacggcctggtcgttcatacccaggttgaggatggtgtccatcatgcccggcatcgaagcgcgtgcgcccgaacgaaccgataccagcagcggcatctctttgtcgccgaacttcatgccggtcagtttttcgatgttcttcatcgccttctccacttcggggcgaagcagccccacgactttctcgcgtccttgtgcgtagtattcgctgcatacttcggtggtgatggtgaatcccgggggaaccggaataccgatcaggttcatttcggccaggttcgcacccttaccgccgagcagttccctcattttgccgttaccttccgcttccttgttgccgaaggtatagactcgtttaacgtctgccataacttgtcgttgttgattataatagtgtttttcccaataaatgtgctgtttcagagttgtttccgccgggctgcgggcgaggccttccattgggaaggcaacggtgaaaaaaccgtcttttccggaggggcaaagatacgatgatttttcggataatcaaaaaacttatttaatatataaaaatattggaaaatatcggccgatgccacccgtatagcgttgtcgccgataggtcggcaggggcgttccgctgcggggatcgagcaggtcgcgccgggcaaaaacatcggcccggatgacggttagcgccgtgtctgtcaggattcggtcgtgcagccaccaaccgccccgtgcgtaggcattgccccgccctcggcgctcggccggagccaatgcatccctgagcgagagtttttccgcagttccagacggaagcttgcctgcacagaggatccggatgccgggtgttcgttcgcgcagctcctccagtagttcggcagcataccggtcgccgcgtgtcagcagtacggctgtcggttttccgtccagcgtaccctcgacgcaaagatagccatagcccgtttcgatgcgttccgtgaagaaccggtcggcatagtaaagcaaggcgaaatccatcccgtccagcgtattgagggtgcggtgcacataactgtacggcaggtccgacgcccggaccaagtctttgacaacctcctcgttttcgactccatacactcctgcgagcggcatcgccattcggccgattacagcgcccgcccgttcgactttggcgcggtaacgctcgccgctccagcgcagccgtccttcgggtgtgtagtccgtgtcgtcgtagaagagcgacgggatcgtgtcgtagaggcggtcgaggtcgtaataggcgaaacccgtgcgttgttgggcgtggatggcaccgagagaagcgatgacgaagaatatcgccagaaagcttattcgtttcatattcgctgccgctgcggtttttcctgtccgactttacgtaggaaactgaccgtgttataatttaatagggtaaatttcagttcttcgatattccggttgatttgtttgaatccgtgatttttgaaaattcgtacagtcgcttttaccatcaaagagtatcgaattgcaacccaaattacgcaatatttccgataatgccaaatccgatgccgtaaaatgtcggaattattttgagctgctgagaaattttgagctttgcccgaacaatctttaactaagttttacctgtaaatcgctgtcaagtcgccgatatggtagctttttttcatcgtatccgctgttgcaggtttcgtatcgtctataaaatcgtcgccggtcaaaaatgcttccgtagtaaccgtgtaaacatacaggctgtctttagtcagcacgctatatatttttttggagcgggggccatctccatattccgccgcaacttcgatatagcgaacaattttaccgtgttcgtcgtgcaatattaaatattctcgcggccccgggtcgtcgcctccgtcgaggaccaatctcatggtacgattcccgtcgaaaggaattcgataatattgtttccaatttccgtatcccgtcgtatcgttacctaaaagtagcgctaaccgatagaccgtatcccgatccgtaatcatggaattgcctgctcggtccagggtgtagtccgataattttaaccgattgttgagattgtccgattgccgatcgatgcaaaataccgtgccctgcaagctacgacaactcgaacaaatgaataatgtcataaatattatcgtgtgtttcgtcatggaaggtagcctttgtccgagaggatcaatatcaccaaattaagcaaaatccggaaaaaatccaaattcggaggtagaaaaccgctgtggggatcattcggtgcgaacgaatatgataattccatctattttccgggctttgcggctggtccggactgtttatgccggaaggttttgtattccggtgctcccgaagcatacgcttacctttaccgaccgaggcgacgttgcctcggttaaaatcatttgtattatgataataggttatttacgtgtcagcatgggaaaacagcatcttgccaaccagcaggatgagatccggcgtttcgccgaaagcaggaatctcgtcgtggatcatttattgcggaaatagatagctggtgaaattttctgtttttgtttttttataaaataatttttatatttacacccgtattttgcgaaaaggccatgcagatggtttgctttaaccgcagacgaatggtgatatgataatattgtaaacgaagaaacccttaattgccttattaaaaatttttttatgaaacatttatttgttaatttattttctcttgtatgcatgctgcttgcaggagtaggattgacggggtgtaccgacgacaagacagaaccagaccccggtacttggccttcattggaagtgaagttccttgaagcacagtattcgacagtcaaattggaggtgactgccgctaatttgacagaaattgcttacctggcgacgcccaaggccgatgccaaggagaccccgacggcaacgatcgtctttgcgaccggcgtcaaatctgcgattgcggacggcgtttcttcgctgaccgtaagtaaactggaccccgatacggagtatgtgatctatgtggctgccaccactgcgaacgaagagttctttgagaaggttctcgaggttgaggccaagaccgcttcgttcggcgataacgcgtacgacgtgtttgacgtggactacatgagttttagcatgaacgtgaaattccagccgaccgatcccgagaatgtgatcaaatatctgctgatagacatgttgacgtataattatcagagtatgatgaactataccgacgccgacatgatgaatctcttcgacgatatatatcacaactatattaccgaggatactgtttttgtattcaacgaggagaattcgattttacgcaacgagaatggcgagcctgtgaccgatgaggaaggctcgatgataacgctctggaacccgatggtgcctggacagctcaattatgtgctgctcggcgagttcgcatccggcgagcacccttggggcttcggtcagggatactatttgcccctttgggatcaggacgcatactacgaagctgtcggcggtggcggtggtatcttgggaaaagccggttcccgtgccgacgatgtagagcagggcgatttctggaccggctactaccagaagatagaggttaccaacaagaagcccgaaaaactcggtgagatcaagatcaataccgataaattgagacccaacggcggtctgctcactttcgagttgtgcgagggggtatcctacctgtgtcttggtattttcgaggagtatgatatggaggggattaagacgtcaatgctgaaaggcgacctgtcgaatatgcagtgggcgctgacctcttacaacgcaccttacatcctcaatgcccagacttatgagatagccaaagggcagaccgacctctctttcaacctgacggagtatttcattaagttcacgccgggtacgaagtattacgtctatgcggtgggtatcaacgataataccggttcgaagcaggctttcgccaaactcgaaggctttatgctgcccgaacctacgaaaccggctcccgaggtaaccgttaccggtatcgatgctccggaaggtcatgaggagtcgccctacgaagtttggttcaatatcaaatgtactacgggtgacgcggtgactgccaagtacgctgccaactacgagcgtgagtgggaggtcgaactcaacgccggcaggactaacaccgacctgatcgaaaacggtaacgcgtttactccggatgagatcgagaagatcaactcggccgagggttacaacgtaatgttctcgacccgtcccgacgccaacacctacctgggtgtaatcgcttacaatgacgagggtaccggcaacgatcccgacgaagatggttctgccatcggcaagaagcgttctatgcctgtacctgataaagagccggtagattcgaagtatttcgaaagtctgctgggtgagtggacgctgtcggctgaatacgagggcggcgaggcgccgatgacctgcaaggtggagatcgtttctggactgacgtgtccggagagtctgtcccaggaggtcattgactactatctgaataacacaaactactcgaaagagcaggtagagaagttgtacgagggcttcaagaagcagcttaagctctacaatgagcgtctgcgcggccagaaccgcctgctttgcctgggactcgatatcgaccgtccgaagtacgagtacagtaccaactacctggccggctggaagacgccatacgaccttttcatcgcaactacggaagagtacaacggctacgatacggagtctatgttcttcgatttcggtccgaagtggtatctcgagatgaaatccgacggttccgtagtcgctccgttcgacgtaaccaacctgccgccgcttacgttatggaacaagggggccgagtactatttcattggtatcagcaaaatggcgattacgcagggtgagttccccgtaacgattagcagcgataactctacgatcactgtagggggatatgagtacgaaggtgatacttactacccgaatgcagcgaagataatgtacggaggacagtattcgaccgacacccgggtatgcggcgcactgacgctgaccaagggttggaatggtgagtccgtgaagtcggttgtcaagggcggcaagtccgtgacgacgaacgatgtgctgggtgccgagcgtgctgtccgcccgttgagccgcacgagcgtatctgatgcgaagagctacgagccgcttaaggttactcctcttgccgagaagtcgctccgcgagcgttggaagcagcgggcggcaggtaaatatatccgtcgctaacagactcttttgaaataaggcagggggaggtacccggaatgggaattttccccctgctttatgcttttataaaataaccggatgcgcaaatccgctggaggtgcggaggcgtattttatggaagcagaagagagttactctttaaatcgaaaaaagattccgatatgttgaaaaaactgtttggcttggcgcttgcactcttggcgacgcttgccgtttcggcgcaggttcgcgtgggggagggccagctctccggtagtttcgagagcaactcgatctactaccaggacgactcgggattgggtgcagcaggcactgctcccgacgatcgtttcggttcgaacaactacatgaaactcgactacatgaacggtcgtttttctgcgggactccagattgacgcttatctccctgcattgcagggatatgagatcggccagcagcccggagcctatcacttctatctctcctcgaagtatatccagtggcaggatcacaactattccgtgcgggtgggtgatattttcgaccagttcggcagcggacttatttttcgttcgttcgaagaccgtcagctgggattcaacaattcgatcgagggtgtgcagggtatctaccgcttcggcgactacgtcgaggtgaaaggtatgtacggtcgtccccggctctacaccgactatgcggattcgtgggtgcgcggtgccgatctgcacatttcattgaatgatattttcggttggaacgctgcgcagttctcggctgagggcagctacgtcaaccgctacgagtcgctcgacaaggatcagacgatcgacttcgcctctcgcggacttacctcgcccaacctgaacatgtattcgggtcgcctgaatttcgactggaaggggctttcgctcaaaggcgaatacgtatataaggggaaggacatctactcgactgttgcggacgtagccgcagccggcaacgccatcttggtcgaggccggttataactacggacctttcagcatctcgggtagtttccgccggttagaccgtatggggacgatgctttcgctttacggctctggtacgggcaatgtactcaactacctgccctctctgacgcgccagtacacttacctgttggccaatttggaaccgtatatcgttaataccgacggcgaaataggcggtcaggtggatctctactatacgtatcgcagcaagtcgaaccgtcatcgctactggaatttccacgccaacttatccactttctatacgctgcgttcggagcagagcgaatcgggcgagcgggagttgatgtggcgtgatattaacatcgatgtagagcgccagtggaacaagaaactcaaaacctcgctgcttgtttcgatccagaagcgcaacccgagtcatggtttccagcgtcagacctacgtatccaacattttcataggcgatgtcacctacaaattcgactcgaaaaagtcgttgcgcgtcgaggcgcaatacctttattcgaccgactacgagggtgactgggtcgcggctttggtggagttcaacatggtgccgcattggagtttctttgtgagcgatatgtataacctcgacgagaccgaggctaactcctttactaaaacgaattattacagtgcaggattcagttacctgaaaaatcgtacgcgtattcaactcagctacggccgcaatcgtgcaggctatgtttgttcgggaggggcgtgtcgttatatgccggcttacacgggtctgaaccttgtgatcacttcatccttttaattaaaaaacagattatgaaattcaagaaattcattatccctgcgctttgtatggctatgttgagcgcgggatgttcggggcaggatccggtgacccccggtaacggtcaaaacggcaatgggggtacgaatggaaacatcgaaaacggtctgcaggtgacggcatcgacgacggtaatcaatgccgacgggcaggatgccgcccgcattaatgtctattatgacaaagtgaaattgtcgctcgacgcagtcgctttctacgatgccaagagcaacgacgtgctcgacctttcgaaattcaccatcgaggacaacacgcttgtgtacactgttaccgagccgggtgaattttcgttctgggttgcttataagacccacaataccaaagatcgtccgacaaccatttctgctgtagagttctcggtgcctgacgctccggaagatccccagccggacaacacctcgttcgtccgccggacgctcatcacgcagttcacgggcttgggttgcggctactgtccttttatgatcgctgcgatggaagatgtacgcaagtcggccgaatatgcggacaagtccgtactggcagcctgtcacacctatgggggtgatccttatcagcccgatgtgcctttggattacgctatgggtgtcagcacgtatccttatgtaaatttcgatttccagacaggggtagggaataatggttacaacaacaacgtatccaatatcaagcaggcgatcgacaaatcgctttctgcggatgctggggcaggtatttcggtcggtatggaagttgctggaaacaaattggtcgctcgtgttacggtgaaagcagctcgctccggttcgttccgcgtaggcgcttgggtgctggaagatggtctgacaggtactcaactgaacaatggtatgaagggggattacgatttcaacacgcataataatgttatccgccacgtgaacagccgttactctggttcggattattccggccatgaggtcggtgcgctggctgccggcggtaccggtgagcatctctttacgatgaccttggatgaaagttgggtcgtgaagaattgtcatgtgatattcttcgtaacggagcttgtcgataagggttacgccgtaaccaatgctatcgacgttcccgttaagtcgtctactataccgttcgagtacagatagtgtattcgaacgtagcagcatactgctgtaaaatttgcggggcgcctccatcggagtcgtcccgtctttttgacgcacggccgatccgtgatgccggccgcaacgcagtggaggtgcggtatgacgcggctgaagaactccggagggaagacaacacagcacaacggcccgtattcctttttggctgaggcagattgtcgatgcctccggggacgcaccgtgatcgaggatgtgggcagccccttgggagcgagaacggttccatgaaaaaagggatcaagatgtaaatgaaaagtcggtggaagtctgtatttccgcagacttttttcatatgcccgtgaccagtatcatctttccggtaagagtgttttcagctcatcctgcgtggaaaggtaggtcatgtattggatggtgaagacctgtttgtcatcttccgtgcgctcgatctctcggatgtgtagcaggtcatatatgtgtaaatcaatgagttgccttgcgtgtcgacagattcggttataaggtcgaaatcaccgacgaggcgaagcggacgctgacagtcatcggctaccagcgcaaatacggcgtccgcaccctgctcgaatgcatcgaggaatttctctcgggactgattgtcgacggcaaactgtacagcggggagcgggtgatcgtggagcccgacggcgaaaaggaggtgattctccggggcgcctaacataaattcgtaccagtgtcggacggttttcgaattccggccgaagcaattatcggtaagaataacacactcttcgcattgggtgacagcacggttcctttctgcaaaaaacgcgaaagcaaatcgtatgtaagcgttactccgctgagcgtgtaaaagaatcgctatacggataaaaaatgctgtaaatttcgcagcattttttcaataaacttcgattacaatcacgtcgctttggtagcgtgcaaactggtttgctttctgcgctcggtttaaacgtttattttaaaggaaacccgaagtcgagaacaaaaacggtctctgttattctcgaggtgtcttaaatataaataaaaggagttgctccgcaagccaacccatcctatgatggaaatgttgttaaatttaatattcttcagttttaaacggctcgctgaaagcaaccactgagttgtattctcctgtttttgcgtcaacacctacaaccacgactttatatattcccggctcgagtttctcgaagcgtcccatataactgccccaatactctccttcgaaaccataggttttaaagaaatgagcacggtctctgcaccatcctgacgatattttttgttttgcaatctcgtcaatgatttgcagagattcctttactgtggtctcctctgtaactatctcataatagtacaatgcagttatcggattaggtataatatgaatgttatggaaaccccaagacatatcgacattaatactgaaggtaattttggctatatctgtctcagtagtgaaatcttttctgaaaagccctgttgttacagactgtcctttatatccaaatgcaaaaatagaatattcagtactactatccagttgtgtatatgaaccttgggtttcgccgcgctccaatctgcttctcgcaatctgatccttgaaataggctataatttcctcatctctcttccctttaaaattagaagaaggtttcataaataccgcataaggatcggaatttgttgtggtaatgttgaaagatacagcatcagaagtaactgttcccagcacaatctcgatctgattgtccgaaggagaaaccttccctgtagcaaactcgacagatgccacttccgaattcactgttccatatggtgtcaacgaacaagcaaggcaaagatagtctgaagactcatactccaacttgctttccttttcactcgggccgtataacgctatttcagaaataacctgatgtgcagttttattcaagatttgacaagtacaatatactgatccactgaagcctgcatatattctgcatttgacatgcctgttcctgcaagttccgacttggaaactatcttggaaaaataacgggactctgtatcgtcaggagtaattgttatggaaaggtcgactccgtctttgacattattaagaaaaatcaaacttgacatcattaggtccctcatatccttctgcaaaacactccttaaagacttttgttgtcatttgtttatcttcactcacaccgaagatagtaatatatctaagagattttccaactccaataaagttaaaatcagcatagactaaaacaactacatatcaacaagttaattgattcttcgggtgacggattgcctccgtttccacccgaatacggtggatagttctattcttatgtaggcacccatgtagggaaccggcaggaatacatgaaccactaaaaaattaacgatatgtattgttcgatcacattcaaaggtcgcaaagacccccaggaccccaagatggtcaaactggaaatgattttctacaagaccggttacacccgcattccccgggtcgtcagtatcaccggagcttacaaatgctggaacaatgaaaccctgagttttgaatccgcttccagcgaatacctcaagaaaaaccaactgctgcttgaactcaaagagaagtacatgtccgttgccgaacggtgggaaaaggaatggcgtaacttctccgtactgcaatgggccgattgcttcaaacccaaagaagaggaaaaggcaaagcaggaattgaaagtgctgacggttctcaagctcatcaacgtccgaatcgaatacttcgagaaccacgaaaaattcaagaacggcaaactcgttaagagtgtcggcaccgccagtatgtacaagcagttccgcacttcgctttcggccttcacccagaggcagtacaacaaagacctgtctcgcttttacttcaccgacattacccagaaatttcttctggaatacatcgtctatctggagcggcgcggcatcgaaaacggtaatcgtgccggcttgcgccagctccttcgcatcttccgtgcattggtaaactacgccaaggacgaactccacatgtacggagccaaccccgcaatcttcgaggcagctacggaaaagatggcgtggggacaggtcgagtccaaagccgtcaatccgaacatcatccgccggatagagttcatggaccgcagcctcttctccgagcaggagtagctttgtctcgaccttttcctcttcagcttttacagcggcggtatggccaacgttgatgttgttaacctgacatgggacatgattaacgaaaaggaaggcatgattgtctatgagcgtaccaaattccccaagctggccaagccactgcttatcgaccgtctcatcgtaattctggaaaaatacagaggcaaggggatcggcaactacgtcttccctgtctatactgagaaacacgtgaccgacaaacagaagatgggacgccgtaacagcttctcaaccctcgtaagtgaaacattggacaaggtttgcgagattctgggaatcgacgagaaaatgacgtggtacacggcacgagacacatttatttccagcgaactcgatgcgggcactccgattacccatgttgcagaaatggcgggcaacagcgcccgaaccatcgagaagcactactacaagaataccaagcagaaagaactgcgccagcgcatgaacgcccgttacggtagttaaagttatttattggttggggctgcataaaattataaacaactcgctattttttcgcttaattctgcaataaagaacttaaattcttttttatgtttttttataagagattgaggagctatcgctttgtaatcacctccgatatgaacttcatcatctggattttcaactattcttttcaaatgttgagttagatgtcctatattggatatcacgtttatccgctctaaactttctttcatggcaggatattcttgttagttcgtcaggaaggcaatcgtcaggtgagacgtaacattgaccattacaatcttgacatggttatcgccttgggctatcgtgtgcaatctcaggttgcaacccgttttcgccgttgggcgactcaacggcttcatgaatatatccaaaagagatttgctatggatgatgtgcggttgaagaagggggtaatcgttacttccgtgagttgctgcaacgtatcagggatattcgtagtagtgaacgtaacttctgtcaacaagttgcggacatatatgctttttcaacccgcaatcccgagcgatacgttgcagcgtgcggttcatgttgtcgcagaccgatggcacgggaaagacgaggttgtttttcgatgtgggacggtagttttcgatcagttgttgggcgatgggcagcagtttgatatggaacggcgttccggttttctgacggtgcgcgatgattcagctgtccccgtcgaacgaggttttaatatgatcgaaggtcagtttcttcatatctgaataagacaaaccggtgaaacaacagaatacgaaaatatctcgcacgtttcccaaccgcagattcggcatcggcttggcgatcagcatctcgatctcttttttcgttagatgttctttcggcggtggcgcaacttctttcagtttatagttcttaaagggattcttctcgatccattcgttacgcaggcaatagagtatgaaatttcgcaggcaatccagaatgttgatggcaccgttgtggtggcaacggtgggcggtctgcaaaaaggtattgaatccgtcgagatagccataggtcacctctgtcaaccgaatatcttctttcttgtactccaaacgtgtatattcatggaggtagcggcaaagacgataatacttgttggaggtcaactgcgtgattcgtacgccgacctctttttgtcgcttctcgcaataaagcatcagctcggccagcaacatacgaacctgcttgccgggacttttcagccgctctttgatttcgatggcattaccctcgaacccttcggcttgcaaggtacggtagatctcgatgactttcgctcggaaatcgtcgatgtaggcatttacttcataggagagtctgtctcgccctgtcgctcgtcctttggcgggatcccacttatcgaccgccgtacgacattgggtataaatctctttggcgatcccattgaccgagattctcgccatgatcggcgccgtcccgttcttcatcacacgatcgcgacgcaggaagaacgaaacgaagaaagtttttctgttcagcattttcaatctgttttttgtgaatcaaatacgattgaaaagctcggaaagttttgtgcaaataagcgttattcagcgtattacgctcattcaaatctaccgataaacattcaaatctgccatgtacacactttggtagatggagagcgtgcctttttcggaactaccctgcttcggtaaagattgcgatctcttaatataaggtgttgataaacaggttaaaatactcttgtttgcggcgaacagtccaaaaaaagtcctctttcgaggactgaaaagtgcggataaaggtgcttccgtacgaatgtaagcccgatgtatatcaacgaattgcgacggtttttcggcttccgtccccgcatcgcctactgtcattttgcacggtcttgcgcccgcctgcccgttcgcctgcgcggccgccgtatctccttgcatgacagtacaaagatagcgatttcgggcgagaaatccaaatgccggaaaattttgagatgcaggcggatttttctatatttgttcgtatggacagaggggagatcatcatttaccggacggccgacggcgagacccgtctggaagtccgcatggagagcgacagcgtatggttgacgcaggcgcagattgcgcgattgttcggagtcgacagaacggttattgtcagacatgtcaacaacatttataagtcgtgcgaattggagcgggaagcaacatgtgcaaaaattgcacatgttcagcatgaggggctacggcaagtgcggcgtatgattccatattataacctcgatatgattttgtcgataggttatcgtgtcaactccaaaaacgccacgcagttccgcatctgggcgaacaaggtgctgaaagagtaccttataaaggggtatgccgtcaataaccaagcgaaagccgagcagttggaggagttgaaaaagaccgtccgcctgctctcccatgtcttggctgcgaaggaggttacgaaatccgaggcggtcgggctgctgcgcgtgattacggactacacctacggcctcgatacgctcgaccgctacgattatcagcagttggaggtatcggccactacgtctgaggagccgttccgcgcgacctatgagaatgcgatggcggcgttgcaggtgttgcgcgacaagttcggcggcagcgccctgttcgcccgcgagaaggacgagtcgttcaagagcacgatgggcgcgatttaccagaccttcggcggccgcgacctctacccgagcgtcgaggagaaagcggccaacctgctctacctgacggtcaagaaccactcgttcagcgacggcaacaaacgcatcgcggcgttcctgttcctctggttcttggagaacaaccgcatcctctaccgtcccgacggctcgcgtctcttggataacaacacgttggtggccctgacgctgatgatcgcagagagccgcaccgaggagaaggacgtgatgacgaaggtggtggtgaatctgatcaataagaataattagaaggattttgtatctttacataaaattattgcataatggcaaccatgaacacggccgatatcggctttgagagggaaatatggaaggccgcggacaagatgcgcggcaatatcgacgcatcggagtacaagtccgttgtgttggggcttattttcctgaaatatatttccgataagttcgaaacgaaataccggcagcttgtcgccgagggcgaaggattcgaggaggacaaggacgaatatacggccgaaaatatcttctatgtcccgaccgaagcccgctgggagcggattgcggccgaggcgcacacgcccgaaataggccaggtgatagacaatgcgatgcgggcgatcgagaaggagaataagcgattgaaagatattctcccgaagaatttcgctcgtcccgaactcgacaagcgccggttgggcgatgtggttgatctgttcacgaatatccggatgcacgaacatggcgactcgaaagatattctgggacgcgcctatgagtattgtctttcgaaatttgccgaggcggaagggaaactcgccggcgaattctatacgcccgcctgtattgtcaaaacgctccttatgcttctaccataaaagtcttaataaatcgagcgagcgtatttctatccactttacaaattttagcgattttgcgttgtgaaacttcagctttcaatagttcttgtatgagaatcctcttatcgtggagtttgtacttctctggagcacttttttccctttaggacgtcctaatattaccccttctattttctttcgtgctaaggcttcttttgttcgttggctaataaggttacgttcaatctctgctgacagtccaaaagcaaaagccaacactttactttgaatgtcctctcctaacttatagttgtctttgatagtccaaaccctacattccttgctcatgcaaatattcagaatttccattatcataaagagattacgacccaatctggacaattcagcgcagataatcaaatcatctttctgtaccttattgagcaattttccgagttcacgtttgttataggcttttgttccactaatggtttcctctatccaaccatcaatttttatgttttgattgtcgcagaaattcttgatttcaaaacgttggttttctactgtctgcttatcactgcttactctaatgtatccgtatatcatatgtctaattataaatgtttatagatatataatatggatagtttttctatagaaacctaagagagcgttgattttacatttaattctttgccatttcgtttttaatgaactttcaatttccattagtcgtaaagaccgtgaaaaatgtttagcccccacactcttacatcagaaaccggatagttcaatgggcttttgagcccccgcattcgtaatgatggctcacgatgtagtgatgttgtttaattaaagtttcagactatgacctacgttggaatcgatgtcagcaaggcgacctttgttgtcgcttattcgtccgccaagaccggcaggacaaaaacattcaagaaccacggttaagggtgtccatgagttcatccaaaccatttcagtagcagagcaccattgagtattagaagccacaggcaattacagtgcgttgctcgtctatctgctttccgaagcagggataaccgtcagccttgagaatccgctgaagataaagaacttcgcccgtgccatgctctccgtcaccaagacggacgagatagatgcccgtctgatagccctgtacggggagaggatgcagccggatccttataagctccgcagtgactcaatcctcgtactgaagcagaaacgaacggtactacgccagctaaagaagcaacttgtggcaacacgcaaccttaaaggctcgatggagttctttcttcttttgaccctgaatgcaagaaaaccatcgaaaagacgattgctttcctcgagaagcaaatcaaggcaatggaagagaatatcacttccttggcgtaaggcgagtacaggaaacagatggacttgctcacctccatcaaaggcatcggtgttacactggcagccgcgcttatcgtggccacaggcgggttcacctattttgataatgccaagcaactgacccgttatctgggcctgtcacctatttaccaacagttcggtacgtcagtcaatgtcaaaggtcacatcaaccagaacggggattcaaacctcagaagccagctctatgtggcggctttctcgtcactcaggtgtaatgccgagtgcaaggcttgtttcgaccgtttgcggtctaacggcaagccaggcaaggtggcggtcgttgctgtcgccaacaaacttataaggcaagccttcgctgtggtcacgcaaggaaaaccgtatgtcgatgggttcaagtccgagaaaccgtaaatactcatctgcggagggaacgccatgcggcaaccttagatttgcagcatcaaaatatttatctttgaattgatattgaaaggaaagcaaaaggaaaaccatcagcggcaatagaagtcaagtctaagtccctattcggtccttttgctccttccttgaactcaaacccatataagaatttcagtaaacctgtttaagattattaggtcaagttcaggtcctttcttttttgtttaatgttcaaaaacaaaagtatgaaagttttttatttaggagttgatgtgagtaagaaaaaattggatttatgtttaaggagtaacggtaaggacatcctttatgatgttattcctaatgatctatcctctattaaatcttggttaacaagaacgtttgagaaatttttcctctctgaggacagtttggttgtctgtgcggaacatacagggcaatatacctatcctttggtctgtgcaacaaaaagtataggagtctacttatgtttggaagatgcagctaaaataaaatattgtcatggaatacctcgtggcaaaaatgataaaatagatgcctgccgaatagcaatgtatgcagaaagatataatgattgcctacaaccgtataccgcatcagagcttataatacaaaaactcaaaaacttatcaacagaacgcagtatgcttgttgcagatagggctaaatatcaatcccagctaaaagatcaggtagactatatggaacactcaatatatattgctaaatgcaatagagttgaagggattatcaatacatttacggattacatagcacaaatagaccttgaaataaaagaacttataaatcaagcacctgtcattgctcatcaaatggatttactcatgtctgtggatggagttggggaacgtgttgcactgaagatgatcatggaaacagatgctttcacttcttttactgatcccaggaagttttgctgtcatgcaggagttgttccgttcgtctatgtgtcaggaagtagccaacgttctaaaaatagagtatctaatagggctgacaaaagcatcaagcatttgctacatatggcggcactatctgtttcacaagtgaaaaatagtccattgaagaaatattatgacagaaaggtcgaagagggaaaaaataagatgtcggttctgaatgcagttagagcgaaattagttacgattatgttcgctgtaattagggcggatgcttttttttcgagaaattatcaaaattcgcttgcgtaatccataagaataggggctgagcagtcagccccgacgagctttccatgcacgacaactgcataaatatactaattatcgttaaccatattcagttttcttattatagtccatttttctttccattttaaatagcttcctgtcagaaactcaaattattgaaatacagttcaaaatactttccaaaggcacttccggctgggtgtcgtggtttccgactccccctccggagctgtttgaagaaggagttcaatatattttttaccgtttctccgttatcgcctttttactttccgaccggtgatgaaaagtccttgtgggcgccacctctttccggtccccggaaatgcggttcaaatatgaacctttagcagcaacgtatatccggcatcttcttcccgtcgatatgatacggatttgggggttcctttcaatgctgtccataaccataacttctgatttatacattaattccatgtgataaccgggtgtttggtcaggcggacgttcccggtggcggattgtcgtcctacgccgcaaagaaaaaaagagtaaatgtatgagggaataccttgtcagttatagtcatatatagacataaatagtcaatgccggcaaaagatatgacaaatggcagtccggcgagagcccgggattcttcccgatattgccgggattgtgtgtaaaagtacgacaatccgttgatagcagtatgaaaagagaaaaaaatgattgaggaaggaggtcgtgaaaccagcctccggaaaacaggatacggcggagatcagataccgtgaaaaaagaaaaaaatccccaccggagatgaatgaaccggcagggaacgtaacaataaaggaacgggcctctcaacccttgatgtaaccgtactttttcaggtcgtccatgaaatgctccggcgtgtcggtcctcaccgtcaccccgtgcagttccctgtaccgcccggagaaattcatcatgtactccttatcggtgcacccgctgtcaaaccagctgccctcacgcaggaggcgtacaaactcggaagggccggaggcggcaatcctgccgccatccgccaaaatatacatatgcctgttcatgccgataattttttagttctcagtttataatatagtttctgttcaccatccaggaaggggatgtcctggagcgcggtgcccgcaggcacctgtccccttgtggcaaaggtaaccaatttgtggagaaacagcacccaatttcgcatttttgtgaagctggtcgttcccgaatgctgccggaactcgaccgtcttgtgccgtgagtaggcctcaaggttcaccttgtggtaacggtcaccgatccttcctttcagctcgtccaccgtccgggcggaacgtatcatcccgtcagagacatggcccagcccacggcaatagtagttgtccctgcgggatgcaggcatgaacctgtcgatgaccggttccaggtgtttgtagctcagggccaggttgcgccaggtctccatgctgaaaccggcggcatcgatatgcacgtgaagcccgcagctcccgttcaccttcacatcacacagctcaagcacccagcagaccttctccagttcacgtaacccggcttcgccgacaaggatcggactgaccagctcgaaggtgtcattcccgttcagactactgtctgtcacgagtttccaatgcggacgggtggtatggttgtaaccttccaccacaacctcgataccggactccctgagctcgcgtgcgagccgttcgcgggaacagttgtaagcctcgatctcgataccgaacttgcggttgaaagtgtaatccggtgcggctgccaacggttggatgttcggaccgcactcacattcactcatacggcgcagggcgttcactacaaagccgtagtttccgttggtcaccattcgtgcgatttccgcacggggaacacccagaagatacagttgccggatcttgctcgtctttgtcgtttcttgtgctaaaatgcttctgatttgctcgttcataatttattacctcctttattattacactactaaggtaatgcttttacaggagatatcgtaattataagatccttattatcacgccattagcttactttatcttaggctaaaagtccttatttaaggtgtctataccctgacatccgctaccggtcggtatcgggttcctccaggccgatggtacggcatatctcctccaccagttcaggaaggccggagcctttctcctgatggggatcgggtggaaacagcgtggaacggaagacacccttgcagacagggtccgcctccctgttgtagcggagggtgttcggaatgtgtgaggacagcagccgcagccccatcttgtcgatgacccggttccaggcgtcatacaggtccttccgccccctcctgtccaccatgttccagaacagccaggtccctttcaggttgcagttcttcctggcgaccagctcctcttccagagccttggtaaactgcagggaactctgcatgacgatgttgtccgccttgagcgggacgaaaatgtagtccatcgcggcaacagtatagaccaccccctcgctgcggagcgttccgggaaggtcgaaaagcacgatatcgaaagtttcccccttttcgtccatataacgatgcaggtcctccaccgccttttccggatcgcttttgatgaccggataggcaggcttccggattctctcgtgctgccggtaaaggctcaccttcaggtcgtcatttttcatgacactctccatgtccctctcacgcatcagggcgatgctgtgctgcgggtagtcacagtccacaaccgccacacgcaggcctttgcggtaatgcagcacactggccagcagtaccgtaaagacggattttcccacgccacccttctggctggcgacagcaaccaacaactctttttcttttttcatcatacttcttgcattaaatgttaaacactattatgaccggtcgggcagggactcttccagaatcatctccaccgtttccctgtattcttccagatgccgcgatacaaggtggttgatgaacccctccagcgtgaccgttccatttctcgaggctcccgccaggatggacagtttccggtgcagggcggcaggaatatgcagtgaccggcgctgcacgcccgcaatgccatgcaggtattcctccccatagacggacggctgcatggggccgcttttccttgcgggacgcattatgtcgttaccggacgttccacgtcccttccggggacaggcaggtgcttcccccatgatctcacggatgcggtccgcgtccatcccgccgggacccatccggtcttttacgttctttcctgtcatgatatatcttcttggacaatgacaacattttatcggcgggccggttctcccggctgcccgtcctcatcccagggacggtagacctcaccgagcagggcggcgatatcctccctatgttcctccatatggagctccagcagccggatgataaacccggagatgctgccgcaaccggcggccctgaccagcatggcgatccggcggtgcagcctcccgtcaatatacgcggtcttccactccacagacttgggagcgggaaccagaaacctcctcttgtattcttccggggctgtcactttccctgcacggacctgcctttcatgacccggcatatccaccgccggttccggggatggggaaacgggagctgacagaaggtttcccgtgagtccgaccctctcgagaacgatatcggaaagccggttcttttccttttctgaatccattgtcttaaaatcttaaattattaaattacacaattggcattgtttcggaatacaaaataaaaaaagaagaggacaggacggaacggaaccacctgtcacttatagtcatccaaagtcggggattgtcatgatacacatgacggggggacgaacatatggttccatccggatggttcttcccatgcaggagtgacgtcagaatcctgctgtccgtagcggcgtggaaaagcggcgggattccgttccttgtccaccgcccctttcaaatccttatgggcaggtgtgggagcatgcatccgtcctgatacggattcttgaattatcggtctgtggaagtgtaaaaatatcaatccgttaatggagacaaggaagaaaaaacataaggcgtacacggctacatgcacgttctccatttgcagaagtgtagaagtgacaatccattaatggagacaatgaaggaaaaccataaggcatacacggttacatgcccattctccatttgcagaagtgtagaagtaacaatccgtcaaaggagacagtgaaggaaagccataaagcatatacggttcactgcccattctccatttgtagaagtgtaaaagtaacaatccgtcaaaggagacagtgaaggaaagccataaggcatatacgattcactgcccattctccatttgtagaagtgtaaaagtagcaatccatcaaaggagacagtgaaggaaagccataaggcatatacggttcactgcccattctccatttgtagaagtgtaaaagtagcaatccatcaaaggagacaatgagggaaaaccataaggcatacacggctacctgtcattctccatttgcagaagtgtagaagtaacaatccgtcaaaggagacaatgaaggaaaaccataaggcatacacggttacatgctcattcttcatttgcagatgtgtagaagtagcaatccatcaatggagacaaggaaaagaaaccataagacatacacggttacatgcccattcttcatttgcagatgtgtataagtagcaatccgttaatggagacaatgaaggaaagccataaggcatatacggttcacagcccattctccttttgtagatgtgtaaaagtaacaatccattaatggagacaatgaagaaaaacaataaggtgtatacggctacctgccattctccatttgcagaagtgtaaaaataacaatccattaatggagaatagggtatggaaagggcagatttccagtacatacgtctcccttattcctgaattatgggcgtaagtcacatgattcaggagagacagccacctttttatggggagagcagccggcaaatgcctgatggaaatgacccgaaaatcacaggagaatagccgtacaatgggctgatacacaattcctattggagaatgttgtccccattaggggacagcaagttgtgttttcgtttaacgaaaacaggacggtttaacggagaatacaccgataaaccgttacttatttcaagctccagcgtcgctttttacatatctaactataattcatttgaaatcacaaaacagattgaaccgaatgtggttagtttgtctgtttatttcatgtccgaatcattagtatgctatgttgcaaagttcgtattcattatgaaaaaatccgcttacgagaacaagatattcaggtaatttgccatcctttccccaaagaagtttgatgttaaaaagttcagaaagcgttttggctatgtcaaatccgaaggcttcgagtgacggacgcactttttccgggtgtcggcatggtgtgccgcagttacgcgtacactcgttatctgagcagtgaagacatttacctatataggcaaatgaacgccctccatatttccgttccatatccaataattcgctctcgattcgtatccgttccggtaaaatgagtttttgtgtatattcaatcggaatatctttgtcttcagggattatcttcgttgccataagatgtgcatacttgtattgtcggagaaacgattccgtatcaaaatcaaatggaggacacccccaacttttaccgtaattggtacattgtttgcaaagttcaagaaaatgtggttcgtcacggaattcggcgatatatccttcaacagtgatgtctgaagtaaaattttctacagtgtatatactcattgtttcaaaatcattgtaccgcataaggagtcgaaacggatgttttcattttggaaaagtctgtcaatgtatccgcttttctgcatttcagacgcggtcaagcaacttaaattcggggtatctaacaatgctatcgaatcgcacatggacaacgcgatgtcaagttcatgtgtcgagaacatgatacattttttctcgtcgtggacaagcctacgaagcaacgccacaagttcgtagcgattaggcatgtcaagaaaggaagtcggttcatcaaggagaatgataggagtatcctgtgccaatgcacgagcaatcatcacacgctggcattcgccatccgacattttatccatcgtgcggtttgcataagcctccattcccaccgaaatgagcgattgcatgactatctccttatctgtttcttgcatcctacctatccagttggtataaggagcacggcctatggctacgacatccttgcaccgcaggttggcgatgcgcgtgcgctcggtcgtgacgacagccagcgtttttgccatatcttcggttttcatgcaggcgatgtcgtgcccgtcgagaatgatttttccggaataacaccggttcagaccggctatggcgcggagcaacgtcgattttcctgtcccgtttcttccgataagggctgtcagttgacctttttttatcgtggcatttacctcgtggagcaacgagttttctttgtaacctatggaaaaatgctgtaattctatcatgcggtgatggatttgttgcgtaaaaccacccatacgacgattgggattcccaatagagctgtaatggcgttgatcggcaaggtgaatattttagaaatgatgtcgcaaagaagcaatatcgatgctcccgaaagaattgttccgggcagaaggacatgatgatcgctattttggaaaagcattcttgtgacatgaggcatagcgagacctatgaaacctatcggaccgcaaaaagcggttatcgttccggcgagcagcgttgtcgagagaaacaacaggctgcgtgaacgccgaatattcagtcccattgttacggcatattcctctccgaacagcaggaggttaagcggtttgatggtcagtaccgccaacagcagtccggcaaacaccgatggaacaagaatcagaagttgtccggaggtgacgtcacccaaagcccccatcgtccaaatgacaaaggctttcagcgattcctctttgctgaggtactgcaatatctgcacgacagcacctacgcccgatgagaacatcatgcccagaatcaggattaccatgatgtcttttattcgctgtccgacggcagttatcacgagcaacacgacagccgcacccacccacgctgctccggcaatgcctattgatgaaccgatcccggcaagtaccacaagtgccacaccgagacttgcaccggaactgatgccaaggacatagggaccggcaagaggattacggaagagggtctgcatctgaagaccgctgaccgataaggcagccccggccaacagtgccactatagcttttatgaggcgtatgttgagtacgattttttccgtggcacgggaacaatttcccccggtcagtgctgcccatacatcgcggatcggaatgttgacagctcccacggccaagtccagtaaaaaaagaccgaccgtgagcgtaatcaatatggagaataatatagtcgaacgggaacgcatctatttcagttgcttgtaatacacacactcttcctgcaccagttcaggatggaatatcttcacgaggtcgcggagcacgatgtcaggattcacgacggcagactcgtaatagtcgttacccccggctgtgttggtacgggcgttgttgttatacacctctccatttttgaaacatcgggtatcggtgaatttcggacatgatgccttcaagtcgtcaagggagttcgccattcccacgttcagccacatgtccgcatccgacgcgagcagatatgcttcttctaagtcaatggggatagaagcgtttcccgtgttcttctggtagatatagcggcctcccgcatcagtaatcaagcgggctacataactttgggttgaaggcatgaaccacgagtcgccatagggaacattaagcataaccgaaggagtgccgagggtactgtcggccactttctttttcaaggcgttgtatctgaccgggattgcggcaaaggctttttcacccttctcacgttttcctgtgacttctgaaagcactaccatccattcggccttgccgagaggcgactcttcaagataatcgccgacatacatgaacggtatgtcgagttcttcgagtttgctttccattgcgcttgcgccgttcaccccatagagcagaacgaggtcgggatcgagcgagagcagcaactcgtagttgatgttcccttcatagccgacatcgccaatactgtcgcggcgggcttggatgtctgggttggaaatgtagtcgattcccgaaacgccggttatacaccggacttcaccgattgcgtcaagcatggcgatatgagtggaagacatcgccacgatgcgtttggcgtctcctttgagtacctgtcctgcaaacccttcgggaacctcttcaccgttgcggacgataaacagccatgtggttacactgtccgctccctgccagggattcctgacggttatcagtacgctttccttcccgcccgcccctttgatgtcgaagccggaggcatattcgggagcataaagcagcaggttgaaatcattgatttttgagcttttgttgtggcagcctgtaaatgccagagaaagcaacaaaatcaggcttaaattctttaatgcgttcatattgatgcagattatcgtttactatttttgttttttccgaacttgggtgttatgccgatgaatatctcgaaattgatgcccggcatgggacgggacaatacggaaaggtattcttcatcgaacaggttgttgatgctgccctttagcgacagatcggcccatcggaaagagagctgtttttccagtgtcacgttattcatgaagtaagggggcagatagcccgtcagggtatagtcattactcgacatggtataacgctggctgtaataacaccatttgtaaagcaggctccatgtccgccatgacagacgtccggtcaccgttgcggaaaactccggcacgtatggcaactgtttgccgacggattggtctgccggactcatcggttcgctctcgttgatcgagggagtccacgagaaagttccgttcatatccagtttccagtcctttccgagcattatatcaaggtgggcgttggtctctgccccgtaagcatgtacctttttgaggtttctgggggagaagaatcccttggttgtgggtagccagatgatccagtcgtcgatgtgcgaatcgaaccagttgataccaccgctcaaagcatatacattttctttccccaccgagaacgacaaccccacgtcgtatgtgaagccgtgctcgcttttcaggtcgggattaccgcccggcagaaaatagaggtcgttcagcgtgggaaaacggtagttccgggagatggatgctttcgccacgatattgccttttttcgacagtaccccgtcgatgaagaaagccgggataaccggggcccattccgtaccgaacatatcctcgcgaaggacaagcgaggcggcaaaacgatcgacaggccgccatttcgcagaaacggaaccggaaaactcgacacgtcccttgtcatacccgacaacagccttgttaccttcctgcgagatgatatttttgtccgcgctttccaccaaatgctggtgtacggaaacaccggccgtgaacagccatttctctgaaggagcataatccccgtccgcacttccgtagaacgtgttaatcttactgcgtgagcgggtcatcgaagccatttcgccgtttcccttgtcccgcttgtaatcataggccatccatgtgtgtatatagccgccttttacaccgaccttccatttctcccgcacgcgatcccacgagaggacgccgcgaaacgtctgctccctttggcggttctcgaagtccatgtcgttcccgtaatccgtgctgagcatcgccagttcccggttggaattgatataccaggcgtttagcccgaacttgtcgccttcgcccgtgttataataaatttcctgcaagacgtgcagatccttataagccccgctgcggttgcgttccgtcgggtaataggaaccgatgatgttcttgtcctcgtcatagatgttttccttcttgtcccggtttcggtatttgtagtcgttgggggaagaggaatacaccacacgggtggaggactgccagtgtttgtcaccgtaggtcaggcggagaaactcgtcgaacgtgctgaacgaccccactccctgcacgtactgcaacccgaacccttcatggttggccggagaagtggagagcctgaccagaccacccaagccgccgcccgtttcgtttaccgatgacgttccgtgcagcagcgaggcatcatcgataaagtaagaagggatggtggaaaaatccgtcatgcccagcatcgggttgttaatgcgcataccattccacgtcacttgggtatgcgagggagaggtaccccggaaagccacggtggataacgtggcgcgtccgtagttcttgacaaaaacggatgagttgaatgtcagcacatcggccatagacaaggcgatgttctctttcatggcgatggaatcgaaacgggttcgttgcacgcctatatccttcataggtcgtttgcccaccaccgtaacctccggaatacgtagtacccttttggtaatgctgacggaatttttctgctgggcggcaagcagaaagggcaggcttacccccacgaacaatagaataagatgtcttttcatttttgtcctccttcctcgttatttccagcagaaagctcccggaatgattcccacgtaaaattcatcgatcagcttgccttgcggcgaatagcgatacacgataccttgttgctggtaatcaatagcgtcggccacatatacctccccgttgttgggattgaccgtaaggccgtagtatttggtgtcccgaaactccagaaaaggccggacgggaacacggtcggcttccaccggcattcgccaaatatcgttgttgatccagtaaagtatatcccgtgtaccgttgagctggacttccgaaggccagtcgcccagcttaaacttgaactgtttctctacggtgaaagtctcggcgtctatacgatagagagacggtgcctcgtaaccgtatgggctgccctcgtaaccgccatccgtgatggtccacatcttgttgtatttgtccatgaccagcgaagtaggttgtatgccgatggtcagttcgtccacgaccttgtccgtctccgtgtcgattttcaggatgcggttctggtacgaccagcagttcacatagacgtacttgccgtattgtaccatttgttcggtggaacccgattccatgtccatgtctggacattcgatatagccggtaatctcgtatgtcttggggttgatgatgaagatacggtagtcccatatctgcgtcacataggctttctcatccgacagaaaatggatataccggggtgaggtgaaacctgtgatacggcccacttccttgaaagtattgatgtcgatggcgaaaatcacatgcgagttgttcaccacgatccagcctataccgtcccggataaccatagactgggccacatcgcccaacttgaacccgttggcacggtaaaacacttcattctccacttcgcacgtggcgggatcgtagtaggaaagcgtggcattgctgtactggaaattcccctcgttggtaatgaaaagaccagaggccgatacagagaaatcttccatctctccgtaatcccatttcatgcaactgccgaaaactggcaggcagaaaagaaaaaggcaaatccgttgtattgttctgctcattgtcattcggataaaaaaaagtacccgaatcattacgggtactctggttaaggtataaggtttaatcctgctgcgtatattgtttgtccttcatattttggaaggttgggttatacccacatttcgtcacgctccaactttcccccgtaatcattccgttttctatgaacttgccgaagaaagtgtagtcggtaaatttcgtcaaaccgtcaaaaacaaccccatgcaaggtctccaacttctccatggaaagtgtttcctgagaaagagaagttgctctttttatctgtaacgtaccgtcaattgtctgcaatttgtcgcaagtaatgccagttgcttgattaataaacaacccttcacctcctacatgaagcaattctggaaggtttaacgatttactttgtaaagttattgcgaacgcccccattccttcgctatgatatactggagaggttgagcaacatactttggacaccaagggtaagtcacaaccggtaagatttccagataaatagaactggcctcctacttctttcaaggatgacattgtgactgtccccatcattggtatttggatgtatccatatccatctatgatttccaagtcgggaaatttggcattgcttcgcatttggcctgtcacatttagatttccatatacatgttgaattgtcgatatggtataatcggtattgttggtggttggcttacaagtgaagtctttgatattcttgaacgtgatttcagggaacttattattcgtgagactggtgatgacaaaatttacatttgacaaatcttcggctgtttcaattttggagagctgcaccttgtttataatttcaatctggggcgctgtttctccgaaggtttcaaatcgggcattcggcaacgtcagtgtcccgctcaaatcttcaagataatctaatgtgatacttccaagtgtggtgattttgctccagtcaggaagttgtttgagtgccgtgaaattctttatctttatctgtccctttatcgttgtcagtttgtccattccaccgaaagcctgaagcacgtcatttcgttggggaacaaaactaccggtaggaggagcttccatattggcttccataataatacttccgtttactgtttcgatttccggaaggttgatggtttccaacatcacggggacggtatggaaatcaaggccaccggtctctttcagcttaaggaagctcatggaagtcagcttggcaagattgtttacggacaagacccctccgacacttgtcagttccggtatttccaaagacgcaatcgaaccggctgctgtgttctcttcattgagtccttgaagattcagattctgacctacagtagtcagaaccggaaactcaaaactctgtaacgacgacgcattgaacatcacgcttccttcaatagttgccagtttctcgaataggacatacgtcacttggtcgttatataccgatatgtctccggagagtgtttccaatgctttcatggaaatcatgtgaagttccgtagctttcgaggcgacatcggccgaacctacctgcaaacctccggccgaaacgatattttccaaccctgtcaagtctgcaccgttgtaactgttacgaatgacaatgttgccagtaacctctttcaaagatgccaatgctgatatgtcagtgattttttctgcctcttccgcatcagagccgataatcaggttccctttgacaacggttgttttggttgcggcaaaagaagctacctcctcggtggtcttcaactccacatctccgtcagattctatttcgcttttcaccactttataggcatattcgcgggcatctccgttataggatgtcacccggaaggttcgttcgttatcccagtccgttaccgtttcaggatcaggtatgattgttgcagaagttgtgtacttgaattccacttcggcattgttcagcgataccgtatagggaacggttattgttactgtattgtccgcaatgtcggccgtgtacgattttccgtccacggtcattacaactgacgtgatgaaattctcatctgcatcttcaggtataatttcatcgtttttgtcacacgcacccaaaaagaacaaggataggagcatgggaagaaaataatttttcatacttgcaatttttattatttggttaaatcctcaaaagaaaatacttccgttgaaacttcgcccagccagccgcttttggccaagacaccgcattgtactttgataaagtcaatatattgcagattggcttccgttccatcggcatggatggcattggaaattttgaaaccgttcctttgaccgcttccatccaccgtactgccgccttctatctggtcgtttccgaaattatccacgtacccccagtcataactctgattatcccaataaccggtttgtgaatcttgggtgttgcgggcggccagacaagtgcctgtcagggtgtaactgttttccgaaatccaagccggataataatagtcctgcgtatgataagcggacagatagtctacccagccgtttctaccgtcggaactgatccattggacatccatttttttgccttccggacggtaataggtcacttcaaaattctgtattgtttcttccttgcctgcttcagatcctttcagttcgtaccactcgtcatccggcaatccgtttccgtttatatcttgcatgacccatacgatacccggttcggaactgccgtcaaaggcgttcccctgaacacagaaatcatattggttacccgaattgggaatactgtggtcgaagccgacgatgatataacccccgaaagaacctaaagagacgtgcagtttgtctttcaaacgctgtgttgcccatgcgacagccgcttcaggggatgtttcgttgccggtcataccacctatcgtgctcgtctcgttgataaattggccgggagctggggtatattcatagactttattccagagcttggaacttcccgaagcccggaagccgtcttgttcctttttgtccacacaaacgacttttacggtggcagtgacagccgttttccctttgtcgatattcctgcttattttttccgtcggtgtgtcttccgacacagtacaggagacggtgtattctccgggtgcggacggcgtgaacttgaacatgcgtttcacttctccttccatgacctgaccgtctacactccactcaaaacggggattgtcgaaatactccaacaacggacgcaggaaaacagggcggtcggcaaaagtgtacctgtccgtggatgtttgctggtaagacggggtcgggaatttgacaacgtagggcatcgtttccacgacctctacgcttacgtctttcgttgttgtcccatctatattggaagcgttgattgtcaccgtataaacaccgagttctttttcattgaaagtataagtattctcggtggaaacgatttttccttcccgtacccattcgattttgaacccttcgacatccgaatgctgaatatcgggagtaaatgtgtaatcggtattccggacgacttttagcccctgcgaaggtagtgccagtgagatgaccggaggggtgagttctttcacttctactttcagttcctcttcggcatagccttccgcattgtctactcttagtttgacataaaaatccccgcattcattccatgtacgttgaagagacggacccgaagaaaccagcgtaccgtctatcgtccaagcaaaaagagcatcttcaacattctggtatgtcggggcgatagtcaattcgtgatcgaccttgaccgtgtaaataccggtctcgctgtcaagttctattataggttgtcctcctacttcttcggtaatgacttcatccttgttgcaggaggtgaacagcatacaggcagaaataataaaatagtgaaaacgatgcatgatgtgtggattttagaaaaataacagtgatacccccgacagaagggatatccctgtattctttttattgtatggtgatatcatcgatacagatataagccggagtattcaaaccgtatgctcccgaatccgaaccctcgaagttgaatttcacactttgcaccccttcggcattgatttcccaataatcccatgtcgtgataggatcaacctgttgttggccgttacgataatcggctaaaagacgtttgtaagtgcggatcagaccgccattcgcatcataacattccagattcacttggaaataccctttcatctctttcagaggagtcgctacccccgtagaaccgaactgattaccataagtaatgacaccataagtgtatgaggtgttgcagatccacaggccgaccaatttccggggaacattgaaataaaattccggtttagccatccatgcctgattgtaagcatccacatatccgtaaacgacaccgaaattggaaccgctgtgcccggcttccttattctgtccttccgcttccaccgcagtgttatagacagaacattggtttagataagaataccaccagtctccggtatttcccgactgattggagcggatgttccagttggaaagtgcgatgccgccgctggaatactctgtgcttccacctacagtattaaacattgaaaggaagagatattcttccggagtattgtcgtaaatggtggttacttgaggatacccttggtacgaataaagattttctccggccgaggtaggtcctgctaacatgccggaatcgaaatcgtcgaaagtgatagtcaaggtaccgtccggatttgtcacagcacgggtttgcggagttccggaataaaccggttccatcaaaaagtcatcgtccgagctacagccggagaacaaggcggttgcggtaaatagacaggcacctgccagaaagcgtaattttcttttcaaaggtcactcgttttaatgtaaaacatattattaacaaacacaaaaaaatcccgttcgtgcggacttacacgaacgggaatatgtctgtcttcaaatattgaatggccgatgagctattccttatttgattacgacctgtatatcccgcaggtgtaaatctcattccggtcatggcaggtcttctgactcgtcccggtcatcgtgccttcccggtattacaccagtggcaaaagttcgatgtccgtttttgtggactcacagcagcgggtactgtcccggatttttaccgggttcccttttcattcggaaggcgtaaacctcccgaaaccatttcccgactgcaaaattatctatattacatatcaattccaaataattcataatatttataataaaacacacaaagcatgacaaccgtactgttttaattagagcattcaagtttacgacaaacgaagacggtaattatcatacacaatatccataaaccaacaaaacagcttgccattttccataacaatgcgttctggaatagataactgttagctgcaattatgcaagcaaaaaaagcagacagaataatgactattaatatcatgcaccagaaattaatcctataaatttatggaaaacaagtaagggaatggaagttccgttgccgcatggatgcaggtgaaggaccttctcttttaacgttggatacgccaatgcacgccaacggaagactctgatattatctgtttggaaaggatataggatgtgcgttactttgtcgcatattcagaatcttaaaaagaattttagtatggaactgacaattattgaaacaagcgcgtattaggagttgagaaagctggtcagcacgctggtcgtacagatgggcgacttccagaaaaagattgccccgcctgcgccggacaagtgaatggatgcgcaggacgtatgtgatggacttatgcccaaacactttctgaagagtttccagcagcatccccttgagtatggccagaacggcaaatgcgtggcgtccgatgtgcggggtgacctcgccccggagttgcatttcctgcctatgattccaagactgagccgcatggcattgtattcacctaccggaaagacacattcggggagtctttcttttcatccgtacccctatatttttcaatcagttcgatagcaatgggcaataattttacgacatacgccactcccgtttttatacggttgcccatcagccatgtaccgccgtcggagtcggtatggatattatcgtatgttatggctttcaagtccacataggaaagaccggtgaagcacatgaacaggaacatgtcgcgcatggcacgctggcgtttgtatctcggttctatatggattatcctttgcagttcctcttcggaaaggaaagaacgcctcttgtattcgggcatacactcgaatgatgcgaacggatgaacccgtatccagcctttttcctgcgcgatatacatcagccacttcaaggtattgacacgcccgaagacagtggagtttgccaaagcgcatgtaccgagcatccagttgtagtaatcctcgatgaatgatttctcaagttcttcgatgacaatatcctctgcattcttcttgcttttcatgaaaagcaggagactcttgtaatcggcaaccagaccgcagtaggtgctttcggctttctctatgccgattttctttttatacggttccagctgttccctgaaaaggttcataagggtgtggcattcctctgagaagccgacatagcggttatagactttcttggctgtaacaaaactgtcgtggtcgcagatgtactggtagtgcctggtgatttgcgccttgatattgtcaagctcctgattgagtgtacgggcctcctcggacttgcctttggcccggttggttttgacgtcccacaaagcgagggacacttctttcttacaactgaaaccggcttgggttccattgatggtgatacggcccataatcggtgtctttccgttttttacagactgtttattctcaaaacacttagctatacatggtctgcgataagctaagagagattccccttacacaaaagcatggcatctccttgtcgtatctcgcctttatacttttatgtatagtagtctaccggatcgaatgaacaagacctatcccatacataaaccaatttagactgctatgttatttttgaggaagaagatggaatgagaccagataccctctttaaggctgactgtaagtcgattaaatgtagaaaaagattgcttttgtcacaagtaaagtgtatatttgcattgaaagaatcgttctttgacagaggcaaaagaaaacagaatattgtaattcgctcgtttctaaatcgttacctgatattagttaaacagaaataactgtttaattttcaattagatagagattgtatgatgtttcgatttgttgcacgggttcgactatacggcctttttcggcaaatccgatctggaacgggccaaagcgatcagcggaggagtcgattttctgcaagctcccgaacgcgaggagccgaagaagctgtttatcaaggaggcgctgctgttgcggcaggcgttgtcgctctgtcagagtttgttgaactacgagcagcgtctcgaagcggcctatttcgaagctgtgcgcacgctgttgacgcgcatcgaaggcaagggcaaaatgtcgctgcgcgaaatcaacgcacggatcaacgagctgctcaaacagagcatcaagagcgacggtgtaatcaacctcttctccgacgtcgaggaggagttttcgctgttcgatccgaaatttctcgaagagatctcccggatgaaggagagaaacttcgccgtcgaactgttgcgcaagctgattgccgaataggtgcgaatttatcaacggaccaatacggtgcgggccgaaaaattctccgagattctgtcccgtgccatgagcaattacctcaaagggttgctgaccaacgaggaggtaattcaggagttgctgaaaatcgcccacgagatcgcccacggcaaagaatccgacaaagcgctcgatctgaacgacgaagagctggcattttacgatgcgctgaccaaacccgaggccgtacgcgatttctatacgaacgaacagttggttgccattacacgggaactgaccgatgcgctgcgctgcaacaagacgatcgactggaacctcaaggagagcgcccgtgccggtatgcgtcggatcgtgaaacgactgctcaggaagtatgattatccgcccgagggacaggaagatgcgttgagtacgatcatgaagcagtgcgacatgtggagtgaaaacagctgacggattggccgtcggaaaagcgtgataactccggtctgccggggaatcgttatgtcttggatattcctccttcggccttgcggcttcgttccgtgaattttctgctcatcgctgtttgcgaaccgtatcctgtcggtctcggatcgccttgcggatttgtcgctgctcggcactcacccctgctgcatggcctgttcgagcgcgcctacgatccgctccttttcgctgctgccgtccgtggagagacgcagaagcggcaggccgatcttgacgagaataccgtttttgcgccggtcgcgggcgacctgcacctcgtcgaagcggtggtggagcacgccgtccacctcgatccccagaatcggcgtgttgtccatccggttgtagagcagaaagtcgagatgcgagcggcggcggacgaagaggcgctcctcgtcggacagctcgacgttccgtccgaccagatcgtacagccggtagtgtcggtggacgccgatggcggaaaaccgatcctcctcggcgagaattcctccgatgagccgttcggcgatccgttcggccggcgattcgcgtttcgcatcggaggcgaaccgcatggcggcgtactccgtatgctgccgctcgatccagtcgcaggtggcgtcgatctggcgctgattgtagatccggccgttatgggagtaggttttcgaggcggttgtcgtcaggaccgtaaagggatagtcgcccttcggttcggtcatgatgagcagctcgttccggtaatatttccggttgcagaagtcgatgatgagcggatggcagcggtaatgttcgcgcagcagcgtgacgggcagccgttccccgaagacccgtttgaaggaggagaggatgttctgccgcacgtaatcgtaagcgtcgggcacccgatgtttgtcgcgcagctcctcggccttcgccctgagctgctcctccacgatatgcggcagctgccggctgtcgccgatgatgatgatattccggcaacaggcgcagcagacggccgccgtgaggatatcgacctgcgacgactcgtcgatgatgacatagtcgagcaggtgccccgcgccgatcgaagcgcacagcgaatgggtcgtactcagcacgaccggatagcgttcgacgaaggtgcggaaatgcgtccggtagttctgcatcgtgaacgggggccgctcctcttgccgcgcttcgttcaggcgttcgtatttgcggtagagcatatcgcggaacagcgcttccgacaccttcccgtatgcttcgatcaggctcttcgcacgctgctcgtcggacggtgccccgagccgggcgatgcgggccgagagctcggcgatataggtttcgtagaacttgcgatcggcataggcgggcagcagctccgcatccgcgaacagccgcttcccgggccacgcgccgcaccggaacagcagtccggcccgcaaagcgagcgacggccttccgccctgccacctctcggtaacgagatgccggaacgacagcgcacgccggctgtcgatcggacggaagaaacagcggtcgacccgccgcatccgcgcttcgtccagcggttgttcccacagcagatgacggtactcgcattgggcataggagcgtttcgtccgcaggtcggccagctccgcgttgacgcggaaaagctcgtctatggccgccgacagctcgcccagccgcgttcgcagggccgtgcgttcctccgccggcaaccgccacgtagggtcgggcatgaaatcctgctgtttgtccgcgaaaaaggcctgccgtctggtccggtttcccagttcggccatcaacgccccgtactcgtatttcgacagtttgtcgcgcacgttgtccaccgccgcattgttgttggacacgacaccgacggtttttccctgcatcagcagattggcgacgatgttcagaatcgtctgcgtttttcccgtgccgggaggtccctctaccacgctcacccgattgcccagcgcccgctgcacggcgagtttctggctggcgttgcagccgaagggatagacgagggccacgttgtcgacatcgcacgccgccgtccgcccgttcagataggcatacagcgccgtacggggatcctgcggatcgatgcgctgcatcgtctcggcgagcagggcggcgatcgaacttttcttctccccttcgggaacctcctctgcggcttccgtatcggtctccgactccagagaggctttggctgcgagaacctccgcgaaataggaaagtagccgctctttgtctgcggggagcggctgcgcatcgaccgcttcgatccgcgacttctcgatcgccggcgaacgcaagccctctccggcgcccagccggacatatttcccgtagtcgaacagcgtatcgtacggctcctgcaacgttccgtccttgtagatgcgtacctgccggcgtgtggcgagcaggggataacagactacatgctctttgcgatagcggaatacccgcgccgcgccgtaatcgacatacacatacgctccggccggtcgcagcccgacgatctccgacgtcttgtcaacgtaggcgtcgcgccgcttgtcgtgtacgaaaatcagttggtcggtcatcgttcgggtcgtttatcgggaattaaaaaccgctttaccctcacaaagatagtcattttgccgcgatgggtaagaagatgataattggtccggtattattcgcattcgcgcgaccatagctcgtaaagttcgcggctgagcgcgatgacctgctcggagagggctttcagctcgcgcgtgcggcgctccagaagaagcacttgtcgcggaatcgccgtatgcgaaaaatgcgtgttgacggcccgtacgatctggttatagttgttgcccacgcgctgtatctgctcgtaaaactgattcagacgggtcacatatcggcccaaggtcgggtcgatacgcaccacgcgaaactcttcggcgaagattcttttgacgataaaccggctgcggttgtgttccagtccagcctccgcaagcatccggcagaaacggatattttgctgctcatcgagccggaacgagtacttgtaactggcttttctctctttgtgctgttcttccatatgtcaaggtttaagggggcgcgactcgggagcggcacccggcctcgcagagaaggacctttgtcggacaaacaccggtttgtcggacaaaggtacaccttgctaccgtccggcgacggtaaatgcgtcgagacgacgcagggtacgaccgatggttcgaacccctcggcccgcggtgcttcccgggctgcaatattacaacgcttttcgcttgataacaagtcgtttgatcggcctggaacggcctccatgcgacatacgtcgaaagcatccgaagggatactatcttcgctccgcgagatgaatgacagccctcctgctatcatgcgatgacagctgtctgtcacggatgtactgctatcgatgaagtactgctatcatggacgtatatccatcatagctccgattcattgcacgaagtaattcattcactgacttcattccgtcacggacgcaagtcattcacgatacgcatcaaacttcgttttgccgattatctccgtaacgaccaaagcgagcggcccgataagggccgctcgctccgttaccgtgccgtcggagtcggtatgcagccggcttcgtgctcaacggcggggtaatcttcttttcctcgtgtcgatccgtccgagacctcgacgacctgttattcggccgaagccgccgacgccagccgctcgccgaaagcctccatcgcgcggccgatgaccgtctcggagaatttggcgtagtggcgcgtcatgttggtgttcgagtgcccgagaatcttggccagcacgtcgatcggcattccgtattcgacggccatgcaggcgaaggtgtggcgggccacatgcataagtaacaggaaagcaagcgataacaaaaatgagtagataaaacttaaatggttggtatttagcatattcgctgaattctgccaaatgagtaaaacgcaaaaaaaggtaatttatagtattcgttcagttaccaaagcgttagctgtccagttaccgaagcatacaggtaacgcaatgaggagtacagaatctatcacgatgggctattattcactggtcgtcaatgttttgcatatctaagagcgcttataaattaggtaattttgccattaaagaataagcgtatgaaagtagaaaaattcaaggtgttgctctacctgaaaaagagcggtcttgacaagttcggaaaggctccaattatgggacgaataacggtgaacaacacgatggcgcaattcagttgcaagctgtcatgtgctccagagttatggaatccacgggagagtcggttgaatggaaaaagtaaagaagcggtggaaaccaatgcaaaaatcgacaggttgctattggctgtaaactctgcctttgattctctcgtggagcggaaaaatgattttaatgcaacggatgtaaaagaaatgcttcaaggcagcaaagatacccaaatgacattgctcaagctgttcgacaggcatatcgaggaagtgaagtcccgtgtggggatagacatatcccaccgtacacttccaaactatatttatacccgtaaccgtcttgcagaattcataaattgcagattcaaggtgtcagaccttgccttttgccagcttaatgaactgtttatacgtgaatttcaggaatatgtagtaattgagaaacgactgggagtccagactgtgcgtcactatttggccatactgaaaaagatttgccgtatcgcgttcaaggaaggacattcggacaagtcctattttgaacactaccagctgccaaaacagaaagagacaccaccgagagcattgagcaaggatgatttcgaaaaaataagagatgtagagcttaccggctgccgccccgaacactctattgtcagggatatgtttcttttcgcctgctacaccggaacttcatatgttgacgtagttgcaattactcctgataacctatccaaggatgatcagggagcgccatggttgaagtaccgaagaggcaaaaacggacaactgtgccgtgtcaagctgttgccggaagccgtggttcttattgaaaagtacaaggatgagacaagggctaccttgtttcctgtcatcccctaccaggctttgaagtggtgtcttacaagcatcaaaatgaaagtcgggataaaaggccgtttgtcataccacatggggagacattcgttctcgacccttatgacattggaaaacggtgtgccgattgaaactgtcagcaggatgctgggacatgcggatataggtacaacccaagtatatgcccgtgtgactcccaaaaaactttttgaggacatggacaaatatatcgaggcgacaaaagacctgaaactgattctataactcttaaaatatttaaacaatgcgaagtacattttcaattctctattatattaaccgaggcaaggtcaaagccgactggacaacagccatcatgtgccgtatcacgattgacggcaagagcagtgtatttactaccggatattattgcaatcctgaatgctggaataccaaaaacggaacggtaaaagatggcaggacaaacggtcttcttgcgaacctacgggcaaggcttgaaacttcttacatgaacctgttaaaggaaacgggtatgataactgctgaaatgctgaaaaacgaaataacatgtgtagggactgttcctgtaactcttttgaaaaccggagaagaagaacgcgaaaggttgagaatccgttccgtagcgataaattctacctcatcttaccgtcagtccaagtctactcaggcatacctgcacgaatacctgctttctatggggatgaatgacatagcttttgaagacattacagaagatttcggttgggaatacaaactatatctgaagggtaaaggttgcggtgcgagtcacatcaaccactgtcttacatggctgaacagactgatatatattgccgttgacagggaggttctccgtttcaacccgcttgcggatgtaccttacgagaaaaagcctacaggtaaattgaaacatataagcagggctgagttgcaaaggattatggagcagcctatgccggaaagattgcaggaacttacccgcagggctttcatattttcctgcttcaccggattgtcttacgttgatgttaaacggctctatccttcacatattgaaacgactttagacggaagaaagtacatccgtatcaaccgtaaaaaaacggatgtggagtcattcatacctcttcatcccatagctgaacagatattggctatgtataacacaacggatgaaagcaaccccatattcccattgccaaaacgtgacatgttatggtactgcatacatgaaataggcatcgtggccggtataaaggagaatttgagctatcacgccagcaggcattcgttcggcactttgatgctttctgcaggtgtcccgatagaaagtataagtaaaatgatgggacacacgagtattaaaacgacacaaggatatgccaaagtaaccgatgataaaatatccgaggacatggacaagctgattaaacgaagacaagagcaaaagaacaatcccggacagtcgtccgttccctctgccgtccatagaagttagtacagactctattgaaagcgaaaaggtcaggcggctttgccgtttcgggctgaatcttcctctttcagagcgtattcagcccgaaaaccttttccctttcacgtctgtacaatggataccgacggcagcggaaacaagcgactgacggaaaagtcagaagaaaaatataaaacagcatatagatggaaattaaatcacatccgattctatttctatatgctgttcccattacttaagaaggatattttttagaaatacaataaagtgggcagacggtaaactgcgctccctccagaaaaatcaatttttgttttctgcagctttggctgttattctcatctgttcggcaagagtcatcacatttgggatactgtcatgcgagagtaaaatgatgatttttccacttattttttctattttccgctattgtaaatgacatcaagtagctcatttgcaagtttaccatctgtgattttaataatgttatcttcctctgttacatagccaagtatattgatactgccataccagaccgtggacctatctatgatacacgaggataaagatagtttaggtacaatctttacatataatcccaaactttttagataattcgtctgactgctttcctctgatgtaagaattgcaacttgaacaccacttgcatgaagctctctgagcattttaacaaatgtgtttcgttctgtatgatagagttttggagaggatatgacaatagattgtcttgaacttttcaaattttgcataaatgccaaacggaatgtgttaccattgaaaatctgtccttcatatgatgatgtttgtaagtcatctgtattatcaaacagtgtctgagtatcttttgacagtacccgataaccgatggcagagtatccttttaggcgtttacgatacatattctcacaaacaggttcgtgtatatcaatatagtcataaatacgaacatctttctttccctcattctcacggtgcaaacgtccggcatattgtgccaccaatcctttccatgagattggcagtgccaaaagcagtgtatcaagtcgtggatagtcaaatccctctcccacatattttcccgtggctactattacaagaggggcgtctttggggatatcttgtaacttttgcagcgtttctctcttgttctttgcactcccttctcctgtgagttgtatgatgttgatgatatgttgcttcaacatttcggcaagcaattctacatgagaagttctggcagtaagtattataggtgttcgacctgccgctacaacattaaggacatcctctacaataagattatttcgtatttccgattcagcgagggattgtgatagttccgtaaacgattgcttgtcatcggtaacaggtctgtaagatgtaaatctcggcacaagataacgctggaacgactgcttctgtatctgcgccttggcatcggcagaaaaacgaatcggaccgcattgcatgaagattataggctgcaaaccatctttacggattggagtggcagtaagtccatagacataatgtgccgtaacatgctttaatacattctcaaatgttatggaagatacgtgatgacactcgtctacaatgaccatcccgtatccttttataaaaggcttgacttcgtcattttcaaaacacgactgcataagggctatatcaataacaccatgcaacgtgttagaggtagaatcaagacacccgactggagaaaatgccttcttccttcctcgtttcttggaaatctcatcttctgtaaaatctatgtcaagaaattcagacagacgttcatgccattgcataagcaatgccttggagtgtaccagaataagagtatttgtctttcttcgggcaatcagagccgcggctgtaacagtctttccaaaggctgtcgttgcagacaatacaccattggaaaatggcatgagggcattgatggcatccaactgttcatcgcgttcctttcctttgaatgttacgccaataggtttaccatgatttgtattatcaactatttcataatcaattttgagggaatacagcatgttgataatggcatcctcacaccctcgaggcattgcaagatattcatcggtaaaatctgcacggcagataatacgaggaatgttatatgtgggaatacgcatcgcctgtttgctgtaaaattcaggatttttgaacgccgcaatatgtttcaaatgattactaaccttatctgaaatagattttaatggaatatatatcctgtctgatttatgtattataagcctgccgttaaagtcttcctgtgtcgcatcttgtatgactggtatttcccacggtttattttccgaagatgtggccaatgttccaaaatcttcctgctgatgctgtgtcaataatgtatctacggtactttcatctatttttcttacattgtacaggtatgcccattgattctggaacggaagaaactgatcatctacaaaaacgctgtttcctgcttttctggcttttccttgcaatggtaacgcaatgagattgccgaatccgccttccggtactttatcctgattgggaaagaaacgatcgtatgaatcgaatgtcatccgcccattgcgcttcatggcttccgtaagaattgtattgcctaatttccttgctttgcaggccggtatgggttcattaaagaaagtccacacatgagcgccattgccagagcgtgagcgttctatactgaacggaattctccactctctacaaatggaaataaatgccaatacatcgttcttatatccatgagtacaattcttgtcatcaaaatcagcacacaggaaagaacatttattatcagaagtaacaacgtacagacctataacatcgcatccgttctcatctttaccttccagatgtcggtatatgtcttgattggttaacggggcaaaattgcggttgggacactctgcacatttatgctttttcttgtcacatattcctctgcgccattcgttgatacatacaggttggtaaccacccttttctgtggttttgttgaaccatcgtcgtgcaaaaacatcatcccgtcccttgaaaaagttacggaacaatgcaattttctcatcaagagagagtttgattggaggatatgttatggaagaaaatgctgcactttcatcagcacgtttgatggaggaatacactataccatgctgtgaaagtattgacttaagttcttcattttcagtaagtagggcattgtatttaatgataagcgcattgtatttctcttgaaaactgtccatctgttattttgttgccattaaaccacacagtaatgcaattccaaaactcagaaacgttccggcaaggacatattctgtttttgctgtatccgtgtctttgaatcgaagtatggattttgccgctatgataaaaccgattgcttcatattgcccaatgataacgaatatgattgtaagaatgcgctctaaatttccaatcaacgctcctgcatttttgatattttcacaagattgtgtctctccaacttgatatttctttaagaccagcttgatcaggatgtttgcaggcttgatgcacaatagtaacgccaatatgaacaaaggtatagagtaggtaccattgcaatccattgattggattggcaactttgttgtagagtcaaagaaaaatgtcactataatcaatatcgccaaatgagcaacctgatcaatcacaaaattccataatcctttggggctatatgttttgataacatctatcaccagatgagaaaaagcaatggcaagggcataaaatctgaattcataaataggaacaactgcccatgataccacgccgataataagcgaatgcacatacaggaaccagcttttgaacttcctttcctctttctgtgcacagtatttatcattttgcaggtaaaaatctcctataacatgtgccaataacagacttaaaaacaaccaattattcatattctttaaaatttatctgttcaaaatactttatagattcttctatacaataccattttgtagctgtagaagcattatttacactggcttgggatatacccagtttcttggcaatgtctgcctctttaaaaccaagcagtttatagtaaacgacttcactttggcgcacagtcatatcatttaatatggcatcggtcaaaagagctatagtttgtaaaggggcagataattgctttttacttgtatgaacagacatcgttcccttattaagggaactcatctcctcaagcgcacgtcctgacagatatatagcctcaccatcccaaatgccttgttcggtattcactattctcatatctccaataccaatggccattcgtattccgtatgtatggaaatttttcgtcttttcatttttagctgtggaaaaagatttgatgcaggatttgattataaaggctatccggaatacgtttgatacattctgcattacacactctatatagtccccttttatttggcgaccttcaaaatcaggataactcacttttaacaagctaaataatgattctatcctttgctttaatcctatagtttcattcacggacaaggaagtggacgaaactatatccgctgaaattgttgcaaacatattattgtccattgatttgataacaaaggtatgaattttcttttattccgccaaattatagaccaaataacctataatcgtagaatatagacaaataagtctataaaggtaatttatatacaatatgagctatagcaaaaatctgcaccatttccataggcaaatgatgcagattatagagcaagacaaacatatccattatttcctgtacgcctccttgtaccctttcatcagtgtcttttctatgtcagaagcccggtagagaatcttgccgcctacctgtgtgtaaggcagaatgccgttgttgcggtagtcctgcagggttctccggcttactttcagcaggaatgccacttccttgtccgtcagcaattcatcgccataggcagacggttgccgtttttccaacaacttttcgagcagggccaacaacctgtcgaaattcgagtggaacgcctttacccactcgtggtccttttctctgatttcattactcatacacgtttgatattgagttatacattattcttgaaactcactcaaatggtcgttcctttccagcgggcttccttacgtttgtcctccacgtttccgactacccgctccacatcatcaggacggtagtaagtccggttcccgattttggtaaaggcaagcgtcccgttatcccttaaggtctgcaaggttctcggactgatacgcaacctgcggcagacctcgtggttgtccatccattcacttgtttccttcccgccgtgttcgcggcacagactttccacccgctgcacgaagcgatccagcttggtggcaatctcctcgaaagttcttttttcaaagctgatgatttccattgtcttctttattttctagttaaacatatattcaaaattccggaacagaacaggtcttttacagccgatatgccatcatgtatcatcgtcctattctcggttggaaatatgactgttttttctgttcccactacaaataaaagcagtagaaatcacactgcaatggattttcagaccggtgacgatgcgttgcccggaatgacatcatgttacatctcaactgcatacaatgagctttctttataaacagaatttgcttgaacaatccggtatggagaaatcactccggcaaatcacggcaggcagcaccgaccgcccaatcagtattgtgcatagggtaacataattgccacggtatctccatttgcttgattctgttcactatacacatttcctttgctcacgacaacgagtcaaggtgcgcaccgagaccagtgagtaaaccgattaaaatcaaaaatgtatggtaacaaaaaagaaattgaccaaagaagaatgggaggccatgacaggtacggatatgtcactcatactcccgtcagatggcagcattgagactgccagggaatcatccttgaatgatataggaaaagagaagtcagaaggaacggtagaacagaccgacaccacatccgagaacctgcaaccatcaacaggaaaagaagaagccgttccaacgtctcagcgtcgtataagcagcaggcagaggaagctttccctggacgaataccggaaagcctttcttcaggtcccgagaatcgaagaccgcaagcccgtgtttgttagcggcgaggtacgtgacaggctggacgagtttgtccgcaggttgggaggacgcaagatgagcgtttcaggactgcttgagaacattgcccgacagcatcttgaaatctactcggaagacttcgagcagtggagaaaactgtgatattttcctgaatgacagacttactgactccagtcattacaatattcagacagtctgtagccgacctgagggggtaacggacaaaacttcagttttgggagttagcgaggttatctttcgggcatcccgaaaacctcgctccactcccgaagagtggaggcaatccgctcccggtgttcgcagattgtgagaaaaagaataatcaaaaatcaaacaaagaaaatatgaatgacagaaagaaaaacagaccgaggggacgcccaaaagtaagcggagtgtgcaaactcagcaaagccgttacagtgaaattctccaagatagactatgaacggttatgccgacgcagcagacaggccaacctcacgctggcggaatttctccgcgtatcagcctttgagacgacgataacggccaggcactcggccgaagagacagccgtcatacgcagccttacgggtatggcaaacaacctgaaccagctgacccgactgtcccatcaggccgggttccaccgtacccaaaggatagtgacagaactcctgcagaaactcaaggagattattgtccggtacaggtacggagaaaggaggccgtcatgattggcaaaatcaagaaagggaaatccttcggcggctgtatccgctacgtgatgggcaaggacaacgcggcaattattgactcagatggcgtattgctgggaaatatccgggaaataacggacagtttcaactaccagtgtgagcttaatccgaagataaaacagcctgtcggacacattgcattgagtttcaaacctgaggataaggcattgttgacggatgaatttatggctaaaatagcccgggaatacatggaactgatggggataaaaaacactcagtttattctggtaagacaccataacgcagacaatccgcactgtcacctggtttacaaccgcataggatatgacggcaaggtaatctcttcccaaggcgattacaagcgtaatgaaatcgccacgaaactgcttaagaacaagtacgggctgacatatgccgaggacaagggcaagactaatgtggagaaactccatgcttcggagcgtgtgaaatacgaaatcttcaataccgttaaggcagctttgaggcattccaaaacatggaaagagttcaacgattacctgcttcgccgtggcatcaggctggaatttgtaaaacgtaccaaggagataaaaaagccggatgacatacagggaatccggttcaccaaggacgggcagaccttcaaggcctcacagatcagcagggagttcagctttgccagactgaatgcccaattgagttggaagccttcggaaacccaacaggaatccgaacataaggtgcaacaaaggataccgaacggaggccatcttttcgaaagtacgggaccgggactgttcagtccgacaaatggcaccgctcccgaagagctgttatctcaagaagaactcttgcgcaaacgcaagaaaaagaaaaagaggaaaggattcgggctgtagcctgtcctttcttcattcaaattattcattaacattaaaattgcaggaatatgaaattggaagaatatatcgagagcatcttcggatgcctggaaagaatcgaaaacaaaatcaacgggctgtccgctcccttgctggaaggtaacagcccgacagttaacaatgaaaaggaaaaggatgagtccgtgctgaatgaagtcaagaatggtcatgagacatttcgcaaattgttggctcgcatgtgcgagggacttgccgccatcaagaacgatatgatttccatggacaggaaaaactcgtcacaggaaagacttggacaggtcttgtcggaaatgcgtgatgaacagcggcaaaatcaggagaaagtggaaaacctgttttgtgagaccaatgacacaatcagaaagaatgccgtcaagacaagcaacatcaaccatcatttcagcctgagcataaaatccccgtacatccttgggagtttttccgtgatgttcgcgacaatcgtgattctgtccgtggctctctatttttcggtgaggacagataacgtgcaagtcgataatgatctgaaatatcgttatgtcaagatgaaaggagaggctacacccgaacaacttgtagaacttgagaacctcttcgggccgaaccggaacaacggacaaatcaggcagatacgtgaggacgtggaagcctacgaggaaactatacagagaaaggcagcattgaccgagcaggcacggctgaaggatcaggccgcaagagaactggacagcaaggcgaaatccatcaaggacaagtctattacggacaaacctaaaaagtaagcccatggccagtgttaagataaaaattagactttatacagccatatagctctttcatttaatactaatacttccctgaaagatgggatatttaaatgaaaaagccataatactgccgtagataaagagtgtatatgtataatcaatcttctatacaaaattcgtaatcagataaaaatatatcagattttatatactttcgctttttgaagagtagatttaaaggactcttaaaagaggcgtatcattactcaatacaaagcttgatacgccttttcttttagaatgttcaattttaatattttgcacactatcacgttccatataatgttggttaatatctgctctgttatatctgtttattataaaagtataattttatatgcaatcgcaatgcacagagcgatatttgttgagacatttctcaattttagtcttaatgctcattctgtatttatctggagctaggacttcaacatcaggtccaaaagctagaattaattggtcaagttctcgtgttggtattactttgatggtaactatgcacttgtattcatcaataatttcctgtgaggtgtgcagtggctttgaaacaatgtatttaaatcgttctgaactaaattgcaaaataattgtttcggcttcctgtacttcataaggcaccgatacccctacaatatcatcaaagtaagagttaaaatccacaaggtcatttttacagaatggtacatcacttctacttatcccttcaattcggtcaagggctcggttgacaatataatctctcccattaatacgtccgaatatgaaccatctgttattatattgtttcatataatatggatgaagcacattcgttgaactaatgcctgcgtgtgttgtgtagcttacttcgaggggctggtgattgattgttgcgtctatgagagttgaaaggtattcaagcccttttaaacatgagttacactgaaatgaaataagattttctctatccgattttactccaaaacgaagttctagattggagataacatcttcaagccaagcattaccagtaactccacgatatttactaagcatttcaattatcgagcgtaaagagttaacctcggtaaccgatagaccattctggtagattgaatagtttggctcagaatatctgtagtagcatttctttcctccaaatggtttggcatcaagatagatgttatcgggtagcatctttcttatggcatttaggtcacctcgtaactgacgcaacttgatggtagagtccgaaccttccaattcataaagatgattgttgactatttcaaggagatcttcgatagtatatttcttattccagtcactgaagcatctgtccagcacttgataacgatactgagcgtttctattttctgacattgttagagttgcttatatgagatggtgtaaagtattccgtttcctatctgctgtttattgaacagttcgagatctatattccaatcttctctgaaatcgcggtcggtgcattcagcgttatctcttccaaatggtgcccatccttttgctatacctgcatctggacgtatacagacctctgcattatccgctttaaccgtcagacaccgttcatgctcaacataacctgtatcttgaatttccggttctattccggtcagttcaaatatagcatccttcaggaaatgatttctcttcttaccgttggcaaaatcttttatagcatttactgccacatctgagtcattaattgagacgatatttgtgacgataaccttaattgataccaaaactaagtctgcttcattcttcagactggaaatcatttttgccaaaagcatacagcctaagggcgtttttaggtatctatcagaatattcaatagaaacagccttgcctcgtaggttagatattattctattccaattaccagtttccggagctttcagagaatcaaaaaaacgacccaacgagctgtgttctcttattctatattcgaacataaaggaagaatcgtccgatgaaaaggcgctcaacagttgcattctatttatgtcggcataggacaatgaatttggctgtgtggttatgaatacatctccacttccccaattcttagaataggatgtatcaatatttttcccaaagtatgttttgacgattccgtcattcataatcacgaccatcaacggaaataatcctgtcggcagtgtgttttcaagacatttaaagttggttttaaatacctccgcaattaaagttgcactgtcagctgacgagagcgattttacatctggtacgcttggcagtataaaggcaacgtcaactccttctagagatagttctgtgagaatttttataaatgggaatgtttccgcatcccattgagaaatgttgtcgtcgacaaatattctgataccagagatgtccttgttccgtgtgagctgataaaactcggtcgtgatgtctgatgtcacagcatgagaatcaggcattaaataaataatttcctttggggcaacacgggccttgacttcctgtcttaaccattctagagccttgggccggttaagatagttcgtataccattgcgatctgcgatctataaggcacttcgtgcaagaccgttcacagtcgcatctttcaagagtctccaaagccatttttaggacttcatctttatattctcggaagagtaatgaataacctgcaccaccgagagcagtatcatatatgaaaatagaatgatttatgccatcatagccgaattcaatctctccatcgttgactccgagcagctccgtgagtttacggctaagaatcacgccgagagaatagagtgtctctgtgtcttctaccagattgttgtccttgtcataaaacttgatctcaacaaagtcagtctggtatcttccgaccaacaacacatgacgtcttactgcagcaccgtcattttcgccaccgggacaagaggtcgaagctagaagatgtttatggtgcgacagcatccgctctgtggagtctggtgatttttctgatttcattctaccgcaataaggacagaaagcatatccatacccactcgttcctttattataaaagagaatctcagaccttggcgttgaacagcggatagacatttttgcagaatttgtcttcagaagccaggcatccatttcaagcaaaataggctgaatgaaattcatactgccgagagagtccatttttcgtgtcggggtcgaatcccatgctacggagaatgcagcaggttcaacgacctctgtaaaacgctgatctgtcgatagtgagatgtcctttatgccatgcatagttccatgccgaccgcacttgggacaatccgtcttagcacttccatagataatagttgtataaccacaatgagtgcaattttgtatgatataccttgaagtgctgtcatcgtattttgtcttcagacgaataccattgggctcatagacccattcgtttttcactactggattaccgggagcataagaggagatggcctgacttatatgcaatgtcggtgagttaccgtcaaccttttccttaccacctagcagacactcaactagtcctaagggtaaacctgcacttggcagaaaagaattttcagcaagatatgacaacatcgaggtctttaaaagattttcctcttgtttctctatagctttgatagcattggtcgttcctgattcattcttcagagattcaatcgcctttgcaagagctcctttatgagcatcaaagacattgtaaacagcaactatgtctttcttgactacttgtgcggcatccgccaatgttatctgagcaagacttgttcccttgattaattttgaatatggttcttgaagacgttcaacctttccgctgattacactatcaatataatttagaaacttatcaaagaaagacatcccttctgccgtgacaaaaaagtccctaagagttgccgtaaccctgattcccccttgatctgctacaaaggatgcgaataccatcgcattaacatgacgttgaatcaactgacggctttccaattttaacaacggagtttctgttacatgtgtaatcggataatctggattgttccatgtatgagttccaataggattgggagcacaaacagttaaagccaaggctttagtttcatttcttcgtcctgcacgtcccgtacgctgaaggtagtttgatgattttggcggcacattattcatgacgacttctgtaataccaccaatatcaacccccatctccattgttgttgagcaagaaagaatattgattttcccctcattaaactctctttcgtatcggtcaagatcttctgacgattgctgagcagaatgttcagctgatataaaaatcggttttgaagcaaatactctggagttcataaccccgaacacaccagcagccttttgttcaaagaagttcttctcaatccattccatgacattcttttctgtctgatccgcagacttgaatgggaaaagcggatttacaaactccgtcttgattttgaatctatcgaaattttcacgaccgatgtaaccgttcattcttgggctatagccacagaacggtgcatctataataacattgtcaacaggacagagataacctttttcgataagttgcagcttaactttatcccccatgagatcgagcatatatccttgattttctacatctgttgcttcaagaacattttgtctcagaaaatcccatgcggcatcaagcattgagttgatgtcagcaatctttatctgattgatttgagaaatatcatcataacctagaactgcacatagaagaagaacgagtctattctgattctcattaatcccttttgaacttacattgactttaaaccatttcgatacagggctcccattcttcctcagttctgaatttgaaggatatataggagaacagtacttattttgtgtaaggtaatctttataagctccagaaagcatataatgacgacctccacgaatgacataatccatacaaatcttgagaaaattctgccagtcggtgtctgtacatcttttctgaatgagtgctgggcatttcgcatttttaagtgctggatagacaagacgtacgaatcccatcgtttccaatgagttcgcccgtttaggaatccatccgaattggtcgacaagaagtgctttcagatagtccgttgcattcttgaaattttttctgccacgtgctttatcaacatgttcatacaacttcttgaaatttgagtcattttcaagagactggcttatttgcccccatgacacctcctctggattggggattactggtgtgccattctttttttcttcaagtcgtttaaatttttcaaaaagtaaggtcggaagatgttcccgaatactcagatatgcattgtattctgcttcctcatcaggagtcagaccaccaggtttcacatcattcaaacgcatgtcggcaagtttatgaaaaatggaagctcgaatccatgaacgttctacatcctgattaagtcccatcgcagaacgtgcagacccttgacggctatcggtaaatgttatatactttcggccttcatatacaacgtctgcgtcattactgtcaatgggttcagcattatcaagaagcaatgttgctaaagtacgtccaatttgagtagcacttattctgagataatcaaggtttttaaactcgctgagattattgccacaatgaggacaaagaacgtgattatctcctgagtgtcgaagagattgatatattacaggaatactttcttcactttttaaagaagtaaaacacttgttgcttctattgtcttcagggactagttctattttaccattccgatgattgaagatgtgatatgttctattcgcatttttccttagacatgctttcttcggaatggcgaaaaagaagcgagaaaagccatccgcctcattttgctcaacatcttctatatttcccatatcttccaaatcaatgagatcttccttttgctcatagaaaagactcttgtcaagatcaattacattggtgtgcatcctaaatcccttagttgtgcttgtttcacccactataatgggagagccgcaagacgaacatgtagcaagttccagcatctttgatttacaaactggacaattcatattttgatatgttgtcagacttcctatcgacaatctatattccttatgacgctgacaatcgggattggtgcaaacatacactccacttatcgatctaacaaataaatgagcacgtgttggcaataaagctccaaggccgcctccgttgtttatacctttcactttttccccgagagcatctattatttccaatgaggtatccacatttttcccaattcctttatcaagcatacgaccgatttcctttgctttcaataccggcgaagagttaagcttttttctcaacttctcaatatcagaataactcaattcgatactaaactttttgtttattttggacaattgatcttctgcaattcccttgtttagttctggaataatgcgcttgccactaattatttttatatcttcaaatggttttccagtgagttgagacacaaaagtttttagcttgatcgtcgttttggggtcactttcatccctgatagtcgctgatgttacagcaaaattcacttgatcaatagttacgccaaaagcatctagtacacgacggatttgcaatgataattcagcggctgaagagccagtataagtatgtgcttcatctaaaagaatccatttgagcttccctttggatttttccaagatttcacggtcttctgctcgtaccaacatatagttgagcatagttggattagtaaagagaatctgaggcggagttttccttatttgaggccttgttacgagctgtggataatgagatgcagtatatctgtcagaccgattttctttgtcggtctctccattatatatcgcataggtaaccttttcgggaagagctttgcaccaagcatgaatacgtttctgttggcttttcatcagtgcattcaaaggataaaggaatatggcctgaacacaatttttttcattggttttagccaaatcttgcaacactggtatcataaaacactctgttttacctgatcctgttccggtagtcacgacaatggtttgtggtcgagaagaaagcatagttctccagctttctgtttgatgcttataaggatgcctgtctaatggaaatctcaaatccttgtcaacttcttcgctactcagtgcattaacaaatgaaggagttaacaatctgagtttagaagaatgttcctcaaaactgtcggcactctcctcccaagggaatattgattggaatacaggttctgcaaaaagaggctcatccttagtcaaaatcctcttgatatattcttgttcttgggcttgacccttgaaccaaagagaggcaagagaatctattaataattccttggccttattgtagaatgaaaaataattcatattcatttgtttacaatttgttttactgtcccaatgaatatctcactgtaggtttctttaaagtattttcggtaaaaattaatgatacgagcatagtctcgactttccaataaaaaaagatttgtgcgattttttacttgtgcgaagttttccgcagcacacattgcggactcaatcattacacgataggacttgtgcatctcttgatctacataatatttattttgaagtacaaatcgggttagaggtaggtctatattgttatctgtacacccatgtatttttgatttaaattgatttatgtccgctcttgagaaaatcctggcatttccgatattccctcccgcaacatattgggtaagttcagacgcaacttctgcagatagtgtagcgttgaaaagtgcatttatcagttctgtaatctcacctaattttgtattcattatattaatgagtgttggaggaagcgaacgtatgaaactctcaatacattctccccacacagtgtgcggaatccaatgtactgcaatgtttaattcatcttcaaaacggtcaatttcttgaatgagaacatcggaagcgccattaatccaacaagctaatattaagttaaccaataatttaggttcacaaccaatagctttgaaagcattatatgtggtaaatggaagattaaattctgaaataatacggaatgcttttactgtctttgcccaatactcgccggcaaaaacatcatccttgcaaagcctttcactccaaagtattgtgttagcagcagacatctctccacgtacttccgaactgtaatcttcttgttcaaaattgtaatacttaggaacaagcctgcgcgaactttcgggaccagagaaaagaattgcttccgaattcaaaagctcatcaggaattgtaaacaagttcatttgtcgattatacggctcaagctttatctgcactaattcagctggttttatattttctgaaaccggcaatgcatatacatcaccgtcatatatgaaatcggaagtgtcttcgctggtataatctgtgattcgaattttatctgaactcaactcactatcaagaacaaattttcttatatagatgcgtttgtcacatatttttagttctatggaactactacggtcaaaagtatttgcaccatataattgaaacattcttgcaaacaaatcacgataatcggataatggaactataccttcaattactggactcttaagatgcttgattgtattgtcatcctttattttatcagatttgtaagttacatctatcataccagactgtccatgactgattatattaaaatatctcaggttatcataagatatgatttttcccgatggcacaattttcccttccaaatcagatattactataccctcaaacggtgctacaacagatactttcaaaggaggattattctcggcaattattttcaaattacacgtaggagaatatttagaagcacaggcatctctggaaatcctccaggtatttttatccgtcatttcaacagataagttttcgcattcatcaacttttgcagagataacatggcgagaatataggtgtagctctgtggaaaacattgtttcgttgcgagagacaaatgtcatatcgtctatgaaataaaatgtttccatcacgtatttattgtcaggaaattcaaccttgatatcaacaagcccaaatggcaaaaggcatgaattggacaaattccgccactcagccttactattatgaacacgatatttaggcttgatattcccgactctagtgccagtttggtcaaaaacgcttattactggaatgcgagtcaataacttaaaattggattgctctacccattgtatatatgtacctctgaattcagcgctataaggcgtgaactcattggttatggttatatcctcattcgacatgcaattgtgtaaatctactttatcagtaaacttaatcgccgaataaagttctccatttagtaatagattgtgactaccatcacacttccaattagtagagaaaacagctatattattttcagcattcgctgtcgatttcaaagaatatacattatcatcaagcatttggaaaacctgagggcattcaaaattcggaggataactaccacataaagttggaaacaatctgtcatcgttgtcacacctgatcttaacttcaactacaggttctccactccactttatatcatttgctacgccaacagttatacgagaatatatcgcaccgataacctctcctttgtcatctttaactagggattttcttacatattttccaacaagtataccagagacaaacacatcgaaggtgtagcacgattgatagtttagaccttcaatagattttgatgaaatctcttttactatatttaaattgacaaaaagatttgcagttttacttgaggtcaaacgaagtttccaacttagagaaagtggtttggttctatgttcactcttaactcgccggtattctctttttaaggatttagtcagttccgacaaagaggaatccgtatcatcatatggtagccagcggtcttcttcggatatgattgcatgagcaatctgtaatgaaacatcgtaaatattgtcatttttgaacgctttcccaagataagctatacaattaaaattcttgattaaatctatattattatcatcccaatcaatatttattgaagacaattcttcaaccaatccaatgagaaaacgtgaaaacccgctaagattagttccgttctttatgtaatttacaggaagacctccttgatttagtaaagttctaaaatattcattccccttgagagagtgaataaatgcaaatccatgacttttaagcccatgacgtgcagctttatatagttgctcccaacaataatgaggcagtcctaatccgactgcaacatcttctctggaaggaattcctccattatagtctcttctccaccattcagcgtaacacaaggccgcctctattccaaaatcttctaatcgatacgcattttggacaagagtctcctttaagtttgtatattcttcctcggttaatttaagtttccaaaggggcatatctggggttatggacggtctgttacgagcatccaaaatcctcatcaaaacaacatgctgttcactattgcatatattaaccatgttctaaaaatcaattggtttataatcttttgtaaagatagcgcaattctgtgcaatcacaatgcacagtaaacaaaaaatccaagatggatacatttctttccatgtattgataaatgacttaattactagactcacttaaatttgttggtattgcaatagatttggagcgataatcgaaaataagaagtcaaagcaataaacgattttaccaaaattctgcaatgatagagaaagtagacactggacattatccatattttgcagtccatctagcttttctccaaaggcaagggatgatttaaaaactaatatgcacagtattgttcttcgtttgaaaagcttgtttgctattcctttttccctaacaattgttttggcaattatagaaatactctgtatttttgcatttaatagagcgttcttttgttttaatgcaaaacaagaaaaatatagaacttcgctcgtttctaaatcgttacctgttaaaaaatatattcttataaactgcttattttcagtgtgtaggataaatggtgatgcctagcaacgtatgtcgtgagcgtgataggcaggtgcagatgctcgccgattagtttcagatagcgatttatccgcttgttcgtccgttgcacccgtccgtactgctgttgtgccgtaatgtgaacagaacgccttaaaacagggaaaacatagtcctgcggatgtgcgttcggttggcggtacttgtcgaggatgtcgagggcggcgggttggagttggaacgacaggagtttacccgttttctgtcggttgaaaaccagccgcccgtccacgatgtcggcatagcggatgtgcagaatgtcggtcagattgatgccgcatgataaatagctgaacaggaacaagtcttttgccagttgcaggaacggtttggggtacttggtcagcgtccgtacctcgcaatccataatccgccgaatatcctcttttgtcagcgaccgtttggccgtggcttccttgaatcggctcactttgaacgtgtcgaaagggtagtccgttttcttgattaggccgtcggtgattgcgctgttgtagagtacccgcaacgaacggaaacggatgccgatggagttgtcggaataatgccgttccacccgcagccattgttcgtatcgtttcagccactcggcgtcgatgtctataaaataaaagtccagcgaacggcagaatttcgtcagcgaggtgcggagttcctgaaaggtcttggcgttgcctacacgtttctcggccagcaggcggtcgatgtagccgttcagatattcgccgacggtttggcgcacgaccttgcgggatgccttttcgacaagcgtgttcaacgtgtactccttatcgctggttttgaaatccatgacctgactttggagttcctgcgttttctgttggataagggcttcgatgcgctctttgtcgggacagttacggcgcggtttacacttttctgcatcccagtattgcagagcgagggaaatgtgcagactgatgtacttccgttttcggttcttcgtcagccgtaacataatgggatgctgaccgttggataatgttttggatgtgtagagtaccgcctcgattgttgtgttcatcgggaaaattcggtttacacattggtttacacaaactgcgtaaaccgacggagaacgggctcaaaacaagacacgaaaaaaccacctacatcgctgtaagtggttgattttgagagtgacgccgacaggactcaaacctgtaaccttctgatccgtagtcagatgctctattcaattaagctacggcgccgaattgcgaatgcaaatgtagtgtgaaaattgctcttatgcaaataatttgtcgtaaaatttaccagtctttttattttatatcttggtaagaggggtaattttgaatataatacattgataatgtttgatttgaggtaatctgtgctttgttcggattcttttccgggagtttgtcggtggaaatatcgttgccgggaaaagagggcatttgtcgtgtccgactggctatggggaccggagatttgtcatacaaaaattacccctgcgggctgaaatccgcaggggtaattcgatgattttgccggatgcgcttatttgaccagttcggcgagcttctccttgattccttcgcctcgcaggtctttggcgacgatcttgccttcgggcgagatcaggaagttggtcgggatgctgcggattccgtactcttcgacgatcggggcgctcttgccgtcggtgacggcgattacgttgggccacgtcatctcctcttttacaaggaattctttccaactctcggcatcgttgtcgagcgatacgccgtaaatgttgaatcctttggggccgaactccttgaacgcctccttcagatagggcaattcgccgcggcagggactgcaccaggttgcccagaagtcgatcagcacccatttgccggggccgatgaggggtgtcaccgaaacggtttcgcccagggagtcgggcagcgcgatttccagatagggcttgccgatttcggtattttcctgggcggcgatcgatttggcgatggcggtcaggatctgggttttctgcatctgttcggggaatttattcaggatttcgcgggcttcttgcggttccatttcgttatagaggtttccgaagaagtaaacgccgaccaggttgtcggagttgttgtccaaagcgcggcgcatgatgccgttggctacctggttcagcgaatcgaatttctccatgtcgttttcttgcatggccaccaggaattgtccctgaagcatgcccaaagagtcgtttatcggctggaaaatctcgttcgagcgggtgccgccgacttggaattggcccagatccgcagttttaacgtcgatttttcccggttcgaggaagatgaatccgatgccctggcggtgccggttggtaaggatggccaggtccggctggtcgatcgtgcctttgattttgaacgtaccgtccgcagcgacggctgccgatgcgatggtcggattttcgggattgccttgcatcaggaatacggagtccgtgattcccgggtccagtttgccggtgatggtgtaggtattgcctccgcatcccacgagggtgcctgcggcaagaagacctattaacgcttttttcatagtgctgagaaaggattaaaatgattatttggtcggtttgtgattcgtcttttggggtgttcgcggcgtttgccggatttcgcgctggggattatccttcaaaaaccgttcccagctcgaactgccctttgccgaggcagccttgcggcctccgccgagtcctttgaaccgatcttcgccgagggcgccgttcaatgggttcgaactcatgaaatggtggcacagggcgacggccataccgtccgtagcgtccagtcgccggggcggacgttcgatcgtgagcatgctgctgacgagagccgcgacctgctccttgggggccgagcctcggcccgtgatacactgtttgatgcgtgtgggggcgtattcgaatacctgcagtccgcggctcaacgccgcagccatcgccacgccttgcgcccggcccagcttgagcatcgactgcacgttctcgccgaagaagggcgattcgagggccacctcgcgggggcggtattcgtccacgagggcaccgacccgctcgaaaatgtagcgcagcttttcgtaaggatcgttcatcctgtgcaggtcgatgtcgcccagcacgaccgatcggacctcccgtccgcaaacctccagcaccccgtaccccatgtagttggtgccggggtcgatgcccatgatgcggtatgtcgtcgggtcggacacggtgcagggacgttacttctccttgagggccgcgatctccttttccgcctgactcacgcggcgtgccaggtcgggcaggttcttgaagatggccgatgcgcggtgatattgcatgccgggcagcgccggatagccgaaacgtacttctccgtcaggtacgtctttgtcgagaccgcttttggagccgatgcagaccctgtcgccgatggtcacgtggtccgcgatgccgacctgtcccgcgaggaaacagttgtgccccaccttcgaagtgcctgcgatgcctgtctgggccgaggaaacggtattctcgccgatttgcacgttgtggccgatctggatcaggttgtcgagtttcacgccccggcggatgatcgtcgagtcggtcttggcccggtcgatgcaggtgttggcgccgatttccacgtcgtcttcgacgacgacgttgcccagttgcggaatcttgtcgaagccgcctgcggcattgggaatgaagccgaagccgtcggcgccgatcaccgcacccgcatgcaggatgcagcggctgccgatcacgcacccctcgtaaatcttgacacccgggtagaggatcgttccgtcgccgacggtcacgccgtcaccgatatagacctggggatagatttggcagtcggcgccgatgcgggctcccgcctcgataacggcgaaatcgcccacgtaacaatcttcgcccagtgtcgcccgctccgagatcgaagcccgctcgctgatgccctgtttgcggggttttgcggcctgatacatttgcagcagtttgagcactgcggcgccggtgtcttcgactttaatcaaggtggcggtcacgggttccgaaggggtgaaatccttgttcaccaatacgatcgacgcacgggttttgtaaaggtgtttttcgtatttggggttggtcaggtaggtcagggcgccgggttcgccctcttcgatcgaggagacggtgtgcaccttggcctctttgtcgcctgcgacttggccgccgagaaaaccggcgatcatttctgcggtaaattccatcatagcaatatagtaatcagaggtatttttttatgtctattccttcgggcatgaattcatcgaccgtgcggccgaaagccagtacttcgcgtacggtgctcgaggcgatgtcggctacgggagccggggtgaagagcatcacggtgatgatgtcgggatgcaggcggtggttggtcgcctccatcgtccgttcgtattcgaaatcggtggtgttgcgcacgccgcggatgatggccgaggcatgctggtcgcgggcgaagtcgcccgtcagaccggtatagattctcacttcgacccgggggttgtccgcatagaggtcttcgatgagttgtttgcgggcttcgatgcgcagcagtcctgccttggaaacattgttgccgatgccgatgacgaccttgtcgaagattcgcagggcatcgtccacgagtgcctgatggccccgggtaaagggatcgaacgatcccggaaaaatggcgatggtgtgtgacattgggagcaaaggtaatgaaaatgaatacagaatccaacaaacggatccgggggtgttgccgaatgtatccgactttctgcaaaagtaatgaaaatgagtgcagaatgaaacgagcgaactgttttttatgccgagtgtattccgatcttttgtgaaggtattgtaaatagggtgggacaaaggaaacctgtccggtttgtatcgggcaggatgtgttagtataatttgttcaggacgcgggcgatacgttcggtgatgattgcggcgtagagttgcccttcgcaggccgatagcgaggtgaggccccggtgatcgacatagaaaatttcgtcgaaacgggcaagttgctcccggccgatctccagctccagcagaggcaggcgggcggcttcgacggcccggcatgccaattcccgttcgacactcggcggggcgggcggagtatagacttttttccctttcacggcgaacaggggcgcttcgtcgcatacgtgcacgaatccctcgccgtcgcagcggatcaccgcttgtacgcctgtccggactgccgcccgttcaatgtccgcttccgccgcccggttgtccgccgtcaccgctgcctgcaaagccagcatgcaggctgcttcgcgtgccgaggtggggtattcggggtagggaacgccgtagttcacgacagccgcagcgggccgcagcgaccgcagggcatacccgtcgtagaaggataccgctccggggatcagcagcaggtcgcccgccggtgtgaaggccatgcgtacgaacgaagagcctgcgacggggtgacggttggcgtcgagcagggcggcgatctctgcctccagccggcgaaggtcgggggcccagcgcaacccgaaaagctcttgtatgttgcgagccagcagttccgtgtggcggtcgagccagagggggcggcgtccccggacatgaagcgtctgatagaggtatgtgccttcgatgcggggcatcggctccgggataccgttgcgcagcaggatgcgttccattattggaggaagattttgagaagcagctcgcggagcagctccccgtccggggcgccgcccgcgttcatgcccttcgatttggcgtcgtattcgcgcagcagccccaggatacggaacacccggcggttgtcccaccgtgccgaggtctgcttcagttcgcccagagcgtaggcgttgttcattcgcaggatgcctatgagttccgtgtccgagggaaacggaactcccttgtggcggctgagccaccgcaggtagttgatgcggaaaatttcgcggaactgattgaaaagggccagaatcgttaccagcagggggttgtctttggggttgcgggcgaaatggtcggcgatgcgcagggcctgttcgaggttctgtcccgtgacggccttgcagagttcgaagttattgaaatccttcgagatgccgatgttctgttcgatgtgtgcgtcggtgattttcttcgttccttccggcagcgagagcagcagcttgcccagttcgttggagattttggcgaggtcggtgcccaggtggtcggtcagcatcgcctgggctttcgcgtcgatcgtgcagcctttcgaggcgacgaactgcgcgagccaggggccgatctcgtaatcgcgcggccggaccgattcgagcaccgcaccgtgctgggcgatgcttttgtagagctgcgaatgcttgtccacgttcttctccttgtggcagacgatcaggatcgtcgtgggcgagggtttcgaagtgtatagcgagagtttgtcgagaccgcgcagttgctgcgcctccttgagaatcaccacctggtacgaacccatcatcggcatctgccggcagaggttcaccacttgtcccgcgtcggagtcccgcccatagacggtcagctggttgaaagcccgttcggactcctggaggatcgtcgaggccagcaggtcgcagagagcgtcgatgaagaaggcctcttcgcccatgagcagatagacgggcgcgaacttccgtcccgcgatttcgcctcggagacggtcgtaggccgccatcgtatctttgaattttacgccgcttttcgccatggcttaaatgatctctttggtgatgcgcagcacgttttcggtctcggccgtgagccggtagcggtcgtcgatgcgccgcccgacgagccagacgatctcatccccggaaagcagtacgaactgccgtgccttctccggcagcgggactttatggtcgatcaggtagtcgctgaccttcttgcggccggacatgccgtagggaatgaaccagtccccctcctgccagcggcgcaccgtgagcgggtatttgagtttgtcggcatccacctgggcgatgtgttcgggtacgccgaagccctggatatcgtcgatgtcgcgcagctcgaagtagagcaccgagttgccgcagtagcagcgcggggcgcccgcctcgacctgcacctggcaggggtcgtccgccgggatcggggttaccataatccgtccccggtcgatgtacgccacgtgggatttggagtagaaccgcttgcccgtgccggagttctgttccagcgccctgaccagggcgtccgacacgtcgcctttgaacgaataggtcgagttgagcagttcgaagattacgaaattcagcgggaaagcccggtcgatacggtcgatgtggatcgtgtcgatcccgttttcggtggtgatgacctcttcgcggatgcgctggatgccgtggttgatgaagagctgcgcgtcggtcagacggccgatgttctgacgcatcaggtcggtgaacttggggctgatctccttgatgcggggtacgagtcccaggcggatcttgttgcgcaggtatttggtcgagcggttcgacgaatcttcccggtagggaatgtgttgtgctacggcgtattcgaggatgtccttgcgcgaagcgaacatcagcgggcggatcagcttcccggcatgggtggtgatccccgtcagaccccgcaggccggtgccgcgcaacaggttgatgaagaaggtttcgatcgagtcgtcgatgtggtgggcgatggctaccaccgtgtaaccgtgctcgcggctcaattcgtcgaaccaggcgtagcgcagccgccgtgcggccatttccatcgattcgcccgtgcgctccatctcgcctttggtgtcgaagcgtttgttgtaccagggcacgccgtacttctccgcctcgcggcgtacgagttcctcgtcctcttcgctctccacgccccgcaactggaaattgcagtgggccacgccgacgcgatagccgcttcgcacgaagagcgagagcatgaccatcgagtccacgccgcccgaaacggtcagcaggatgaaatcctccggagctgccagctcgttgcggcggatgtagcgttggaaattgtccagtaggttcataggcagtgccttgtcggttttataatatattgacttcgggttcgatctccacgccgaagcgtttctttacctgttcctgcactttgcgggcgaaagcgacgatctccgtacccgtagcgcctccgaggttgataatcaccagcgcctgccgggggtggatccccacgcgtccttcgctgtggcctttcagtccggcgcggtcgatcagccagcctgcggccagcttgacttgcgaagggtcggctgccggatagtgcggcatatcgggataaagtgccgacaagcgttcggcctcctcgcggccgacgaccggattcttgaagaagctcccggcgttgcccgtcaccgcagggtcgggcagcttggcccggcggatcgcacagacggcctcgcggatgttgcgcagcgtgatgcctccccgcgcttcgaccgctgcggccaaatccccgtattcgagtcggggccggggcgtgcggctcaacgcaaagcggaccgaggtgatgattacacgtccccgcagggagcgtttgaagacgctgtcccggtacccgaacgcgcagtgttctctgttcaggacgagcgtgttgaaggtctccgtgcagaacatctcgacgcttcggatcgcatccttggcctcgcagccgtaagccccgatattctgaaccggagcggccccgactttgccggggatgagcgagaggttttccaatccccacagttcgtgctgtacggcccattcgaccaggtcgtcccactcgacgcccgcgtcggcttcgaccgtcacgcagtccggctgttcgtccacgatgcggataccctgtgccacaggggtcagcagcgtaccgggatagtcttgcgtgaagaggacgttgttgcctcctccgaggacgtaccacggatcaggcattcctttctcgaagagttcctgcaaatcttccgtccggtcgaactcgatgaggcgtgccgcccgctgcgccacgtgaaaactgttgcgcggggcgagttcgggattgttaaattctcgtatcatatttgcaaagttaggaattatttcgttaatttgaatgttttcgacaagcgagggcagaacgacttcactcgctctgccggacggagaaaacagagaatgcagttcgatgtttccgataagcgaggcaggagaggacgactttttgcccggcggagagaacggggcccgcagttcgccgttttcggtcgagtggtgcgggacgttgtgtcgggcagggagaacgaccgttcgacggtttcgatctatgcgagtgagaagggagctttttgtaacaggcgggcagggcgccgtgtgcgtgaagagaaaaacgggcggagtcgctgttttttatcgcccgcttcgtcgggcgtcggtcgatgtggcgccgatcttgctgaaagagaatgaatgtgactgataaacggtttccgatatgtttacgaaagaggattttgtgcaaatggaggagcacggcctgacgccggcggctctcgaaacccagttgaaaaattttcgggaaggttttccctttcttcccgtgacgcgggccgcttcgtgcggcgacggtattcgggtgctggatgctgccgggatcgagcaggcggcggcccgttacgaccgtgcgaaggagtctttgcgggtggtgaaattcgtgcccgcttcgggcgccgcgacccgtatgttcaaggatttgttcgagttcgttcgcgaggggcgccgtacggctgtggtcggggagttgctggccaaccgccgccgcttcgccttctggcccgagctgcggacgatcatcggtgacgatgccgacgagctgcggacggtcgaaaatatcgtcgccgaagggctccgttacggggaaaccccgaagggactggtgtcgttccaccgctatggggacgaggtgcgcaaagccgtcgaagagcatctggtcgaaggggcgcagtacgccgccgccgggggcgaggtgaagattcactttaccgtctcgcccgagcatctgacccgtttcgaagcgttgctggccgaaaagataccgggttacgaatcccgtttcggggtcaagtatcgcatctccttctccgtgcaggacccttcgaccgacacgctggccgtgaatcccgactgtacgcctttccgacgtgccgacgggcggctgctcttccgtcctgcgggacacggggcgctgatcgggaacctcggaaagatcgatgcggacatagtcttcgttaaaaatatcgacaatgttactaccgatgcccggcggagcgatacggtgctttataaaaaagcgctggccggagtattgctcgcattgcaggagcggattttcgaatacctcatggccctcgaagtgccgggtgccgaattggagcctatcgccgcgttcatcgagaatgaactctgcgtgaaactgcccaaggactacggcacggctcttttgaggcaggtgctcgaccgcccgatccgggtgtgcggcatggtgcgcaacgaaggcgagccgggcggcggccccttctgggtggctggggccgacgggctggagacgctccagatcgccgaatcgaaccagatcgctcccgaaaagcgggagttgatgcgctcggcgactcatttcaatccggtggatctggtttgcagcttccgcacctcgaaaggcggtcgtttcgatctgcgggagttcgtcgatcccgctacgggttttatctcccgcaagtcggacgggggccgcgagctgctcgcgcaggaactgcccggtctttggaacggtgccatggcccggtggaatacggtcttcgtcgaagtccccatcacgactttttcgcccgtaaaggtagtcaccgatctgctgcgtcccgaacatcagggcgatgaattttgaataagccattgctcccttcggattttcattcggagggagcttttttcgagatgaagacgttggttgtcccaaacgattgaaaaaatgcaatcgaaaaatataaaaaacaaattgaataacattttcagtgttatttttctgctattcggattagcggcttgctcagatgatcgttaccaaacacaaaatgtaacccatttagtaatcgattctttcgaagattttgcaaaggacagcgataccgtaagtattcggtccataaccctatccttggccgataaacgattttacgccgaattcgaacattcggatatcgagattaattacgaagtaaatgttcgtaataatagtgcggacacagttcgtatcaatctcccggattcttcgaattatgctacatatctaaataatcgtgtcgggtggttgagtggatggaataaaaatgagcttgaaattctaccatgtcgatcaaatactatttgtattaccaatatcggcatgtttggtgcgttatatcgttgggaaaaattatttcctccaaaacacgattacacttttgatatgctaaaaatccttcccgatgtaaaagtatattacaatggacagcttgtattgccatcgaaagaaatagaaatttttacaagcgactacaaagatccgtggatatataaagtgcttaaaaaaatatcaggagaaccatatgctattgatttttctaattagataaaaactaatgtgattgatcgattgttgaaatcgaaactcaaagacaatattttatggttcgatccgaaaaaaaatgcgccgaatatgcgtgggttaaaatggattttatatatttgtaggaactaattcggaggagtgtgatttcgggaacagttccgatgtttccggtcggagtcggggagagatcgcttgcgatcgagtctcggatggaggtgaggaagagaaagattccggtgatcccggatcgaatgcctgcggtcggatttgccggcggggaaagcggtgctgtatgccgtgcgtttcggtcggcggggtcggtgcggggccgggctgcatcccggaatccgtgacgcgaggtcatggagtgacgaataagaaattcaaatataataaacataaattcttatggaaaacaaacttcaacagttaacccagaagctctacgacgagggactggagaaaggccgtgccgaggcggaacgtctggtggccgaagcgaagaccaatgcggccaagatcgtgaaggaggccgaggcgcaggctgcgaagatcctcgccgaagccaataccaaagcgcaggacgtggagaagaacgcgatgaccgaaatttcgctcgcgggcaagcaggccctctcgaagatcaaagccgagatcagctccatgattatcgccaagagcaccgctcccgccgtgaaagccgcgacgctcgatcccgaattcgtaaagcagatgctgcttaccgtcgccaagaactggagcggcgccgattcgtcgaagaaccagttgaaggccctgctgccggaggcggaacagaaggcgttcgaagcgacgttcgaagccgctgcgaaggagctgctggccgcaggcgtcgaggtgggttattcgaaggaggtcaggacgggattcaaggtgggtgccaaagacggcggctactacatttcgttttcggaccaggatttcgacgctctgttgaaggagtacctgcgcgacaaggtctataaaatgctgtataacgcttaagccgggcgccatgttcgacaagaattactactgtttggtagccggattgcgggagtattcgctcgatgccgataccaagggcttcaatgcccgggcgatcatcgaggagattctcgaaggggtttccgcccgcgatgcacgttgcgtgcgtctgctttacggttactacgactgcgagaacctggttaatttccgcaagggacgcgcggcgcacaacccgctgggcaacctctcgcgggaagagatcgaggagcagaccaagaaccccgaccggcttccggcgcgtatggcgaccgtggtccgttcctattcggccatcgtcgatgaagatgccgacaacgaggacgggatcgacaccgaccgatcgttcgagaacgctcttttctcggcctactacgacgagtgcgcccactccaagagccgtttcctgcgccagtgggccgatttcgaccgcaacctgcgcaacatctctgccgccgtcgtagcccgcgttacgggacgttcggccgagcagtctgtcgtgggcggggatgaaacttcgcagcagctcaaacgctcgtcggccgccgatttcggcttgcggggcgacgttccctacctggaggcggtgatcgccgccgtgaacgacgaaaccaacctggtggagaaggagcgcaagatcgacgcgatccgctggaaccaggccgaggagctttccactttcgattatttcgacatcaacgcgctgctggcttacctggtgaaggtgaacatcgtggcgcgctggacccgtttggacgacaagcaggggcgcgaaatgctgcatcgcctgatgaccagtctggacggcaaggatttgatcaataaacaataaaacagataatgaaaacaacaggacgagtaaacggtatcatctcgaacatcgtgatcgtgaaggcggacggccctgtcggccagaacgaaatctgtcacgtttactgcggggataccaagatgatggccgaggtcatcaaggtcgtgggcgacaatgcctacgtgcaggttttcgactcgacccgcggactgaagatcggcgaaaaggtcgaattcgagggtcacatgctggaagcgacgctcgctcccggtcttctttcgcgcaactacgacggtctgcagaacgacctggagaagatggacggtctgttcatcgcgcgcggttcgatcaccgaccctatcgacttcgagaagaagtgggagttcaagccgctggccaagcccggcgacaaggtttcggccgcgtcgtggctggggcaggtcaaggaggagtgggtcgagcacaagatcatggtacccttcacgatggagggaacctatacggtcaagagcgtcgtgcccgccggagagtacaaggttacggacacgattgccgtcatcaccgatgccgacggccgggatcacgatattacgatggtgcagcggtggcctgtgaagcaggccgtgcgctgttaccgggagaagccgcgtccctcgcgcgtcatggagacgggcgtgcgggccatcgacactttcaacccgctggccgagggcggtacgggcttcatccccggacctttcggtgcgggcaagacggtgctccagcatgcgatttcgaagcaggccgatgccgacgtaattatcatcgtggcctgcggcgagcgtgccaacgaggtggtcgagattttcaaagagttccccgaactggtcgatccccgcacgggccacaagctcatggaacgtaccatcatcatctgcaatacttcgaacatgcccgtcgcagcgcgtgaggcgtccgtttatacgggtatgactatcggtgaatactaccgttcgatgggcctcaaggtgctcgttatggccgactcgacttcgcgttgggcgcaggcgctgcgcgagatgtccaaccgtctggaggagcttccgggccaggacgccttcccggtcgatctttcggcgatcatttcgaacttctatgcgcgggccggtttggtcaagctgagcaacggcaagacgggttcggtgaccttcctgggtacggtgtcgcctgccggcggtaacctcaaggagccggtgaccgaatcgacgaagaaggcagcccgctgtttctacgccctttcgcagggccgcgccgattcgaagcgttacccggctatcgacccgctggagtcctactcgaaatacctcgaatatcccgagatcgaggagtacctcgacacccgcatcgaaaagggctgggtggagaaggtttatacgggcaagacgctcgtgcagcgcggtaaggaggccaacgaccagatcaacatcctgggtgacgacggcgtgccggtggagtaccacgagcggttctggaagtcggagctgatcgacttcgtgatcttgcagcaggacgccttcgacgagatcgacgccaactgcccgatcgaacgccagaagatgatgtacgagatggtgctcgacatctgcgaccgggagttcgggttcaccggtttcgaggagtgcgcatcgttcttcaagggcctgatcaacctcttccgtcagatgaactattcggagtggaaatcggagaaattcgaggactaccgccgtcagatcgagaaaacagtgagtgaaaaagaatccaaataaggcgcggtatgacaacacgagcatttcagaagatatataccaagattgaaaacattaccaaggcgaccgtgacgctgcgtgccgagggcgtgggtaatgacgagctggccaccgtaggcggcaagttggcccaggtggtgaagattatgggcgaccaggtgactttgcaggttttcgcgggcacggagggtattaccaccgattcggaggttattttccacggcgaacccccgaagctgcgcgtttcggacaacctggcgggccgtttcttcaacgcctacggcgaacccatcgagggcggcgagcagatcgagggcgaagcccgcgagatcggtggtccgacggtgaatccgttccgccgcatccagccgtcggagctgatcgccacgggtatcgccggcatcgacctcaataatacgatcgtgacgggccagaagattcccttcttcgccgacccggatcagccctataacgccgtgatggccaatgtggccctgcgtgccaaggccgacaagatcatcttgggcggcatgggtctctcgaacgacgacttcctctacttcaagcaggtgttcgaaaacgccggtgcgctcgatcgcatcgtttcgttcgtcaataccacggagaatcccccggtggagcgtctgctcgtgccggacatggccttgaccgccgccgaatatttcgccgtcgataagggtgaaaaggtgctggtgctgctgacggacatgaccctttacgccgatgcgctggccatcgtatcgaaccgtatggatcagattccttcgaaggactcgatgcccggttcgctctactccgatctggcgaagatctatgagaaggccgtgcagttgcccaacggcggctcgatcaccattatcgcggtgacgaccctttcgggcggcgacatcacgcacgccatccccgacaatacgggttacatcaccgagggtcagttgttcctgcgcaacgattcggacacgggtaaggttatcgtcgatccgttccgttcgctgtcgcgtctgaaacagttggtgatcggcaagaagacccgcgaggatcatccgcaggtgatgaacgctgccgtgcgtctctacgccgatgcggccaatgccaagaccaaactggagaacggcttcgacctttcggactacgacgagcgtgcgctcaagttcgcttacgactattcggagaaactgctggcgatcgatgtcaatatcgaaattacgcagatgctcgacacggcgtgggagctcttcgccaaatacttctcgaaggaagaggtggccatcaagagcgaactggtggagaaatactggcctaaaaccgagtagagcaattcaactcaaacagaatggctataaaattccaatataacaagacctcgctgggcgaactcggaaaacagctgaaaatgcggcagaaggcgctccctacgatcaagagtaaggagtcggccctgcgttccgaagtgaagaaggcgaaggacaccgcacaggatttccgacggcagttggacgcgctcacggcgcagtacgactacatggtttccctgtggggtgagttcgatgcggacctgctgcgcatcgccgacgtcgatcttgcggagcagaagatcgcgggcgtgcgtacgccggtgttgcaggacatccgtttcgaggagaaggattacgacctcttctcggctcccgtgtggttcgccgacggagtcgatattctcaagcgcctcgcgcgcctgggtatcgagttcgaggtgttcaaccgcaagatggagttgctggatttcgcacgccgcaagactactcagaaggtaaacctctacgaaaaggtgcagatacccgggtacgaggatgccatacgcaagatcaaacgcttcatggaggatgaggagaacctctccaagtcggctcagaagatcgtgaaaaccaaacaacagcaagccggggagggcgcgatgttatgatagcgagaatgtcgaaatacgacctggtactctatgcgggtcagagcagcgacttcatcgagaagctgcgcggcctggggctggtcgatatcaccactacgggttgggagccttcggacgaagaccgtcagctgctgcttacgatcgacaaccatcacaaggcggtcgagaccctgaaacgattcttggaggacgagcgctttgtcaaggacgagcagcccatcgccgacggcggcgaggctttcgaccgctacatggccgctacgcagcaggcagcggcgctccgttcggagatcgcacgcttgcagaaaaccgccgacgagctgcgtccctggggcgatttttcggtcgatacgcttcgcaagttagcggacaagggcgtggtgttgcgctatttcttcaccagccgtgcggcttacgagaaggatatcgaggcgtggtcggagcgttatacgatcgctctggtgcacgagggtgaaaccttcgattacttcgtggtcgtgacccggccgggcgaggaggtggtgctcgatgcgcaggaggtcaaggcgccgacgatggactgtcgtcaggccgaagcccagatcgccgaggctcgcaggaagctcgcggagctggatcgggaattttcccgtgcggctctttcggtggaggtgatccgccggcatgggatcgagctcaagcggaagttggaagagattcgcgtgaagaatactgcgcagcctgaagccgacggtacgctggttattctggaggggtgggccgaggagtccgattccgcgaaggtagatgctctgctggccgaataccccaatctgattttcctgaagagtacgccgacccccgaggacaataccccggtgaagctgcgcaaccgtcccttcgcccatctgttcgaggtgatcggcgcgatgtatgcgctgcccaaatacggcacgatcgatttgacacgcttcttcgcgcctttctatatgatcttcttcggcttctgtatggccgagggcggttacggactggtcatcatgctgggcggtttggccgcagtgatgctgggtcgcaagaaggggagttcagccatgaaggagatcggtatgctgacgatgctgtgcggattttcgggcatggtcttcggcctgatgtcgggctcgttcttcggattgcagctttccgaatgggagtggctgggcagcctgcgcgatcacctgctgacaccggacatcctcttcccgctttcgatcggactgggtgccgtgcaggtgctttttgccatgatgatcaacgcttatgtcacggcccgcagcttcggcctgcgctatgcgctggggctgatcggctggatcatcgtgctggtcgatagtgctgctgcgttcctgttgcccgagagcgtgggcttcacgttccattcggtcgcttatctggtgatcctgggcgtcggcctggtgctgatgttcttcttcaattcgccgggcaagaatatcttcgtgaacttcggactcggtatctggaatacctataataatgtgtcggggctggtgggcgatctgctgtcgtacatccgtctgttcgccatcggcctttcgggtggtattctggcgatggtcttcaaccagttggccgttggtatgagtcccgatattccggtcgtgaagcagctcgtgatgttgctgatcctgctgctgggacacggcatcaacctcttcatgtgcgttctctcgtcggtggtgcatccgctgcgtctgacgttcgtggagttctacaagaacgccgggttcgaggccgcaacgcgcgtcttcaccccgttgaaaaacgaataaactaaatgataatcaatattaacaactaaaacaaaattcgatttatggaacctattacgttgggctatctcggtatggccatcatgtttactctggcggccgtaggcagttgctatggtactactatcgcgggcaatgccgcagtcggtgcgatgaagaagaacccgaatgccttcggtaactacatcatcctgtcgggtctgcccgcttcgcagggtctttacggctttgcctcgctcttccttatcatgaattacctgaccgattcggttacgatgctgcaggcggccgctatcttcggtttgggtatcttggtcggcctggtgaactttttctcgtcgtatcgtcagggccagctttgcgccaacggtatcgctgccgtaggtaacggtcatgacgtgggtaccaaaaccctgatcctcgccgctttcccggagttgtacggtattttgaccgtggcgatcaccttcctggtaaccggtctgatgaagtaatcgaaatccgggatttcgaaagaacaggcggagcttctgcaagctccgcctgtttgtgttttgtgaggaagagggtgtgtgtggaggggttttggagaaggcatgagaggggacggttcgattcgaggtggagtaaattgcggggttcggcaatgttgctgtgtcccggcagatcggacggttacggggtggaaaccgctggaattccggggtgtcttcggaatccggtcatgtcagtcatagacggctgttttgtgtggtcggctttgttgggtatgctgctttattctgttgtttggagcgcttgttcgatttgctcgatcagcaggcgttgtattgttgcgtcgtagtcggtttcggagagcaggattttgccattgggactgatgataaagttgcggggaacgtatcgggtggcgtagagcgagtagattgacatgtcgggatccagacctacggagaatgcgattcccagctcgcggcagaactcttgaacggtctgctgcgtttcgcctcgattgattggaaggaagcgaaatttccggtcagcaaagcgatcgacgatttgggtttgcatctgctgcatttgtttccggcaggtcgggcaccacgtggagaagaaggtaagcaacaccacgttgccttgcaggtcggacagggtgatcgctgtgtcgtcgagcattccgaccgtgaagtgaggggcctcctctccgacgcggacgagcgtggtttccttttccgtcgggatctcttcggaaaggcagcccgttagggcgagtacaagcaggaacagcacaatagtcggctgtacggtccggtatagaagtccgagatgtcgtgtaagtccggatcgagagaagaatcttgtctgtcgaagagcaggccgtaaatatgccgtcatagggagttggttataatcgtcgggtagagttcaaaattcgttccgaataaaaaagccggaattttccggctttttttcgtgcagggaaatacccctcttcagttgatatggcttgccgcatggggatcgttaccgcattcggtaaagctggtcccgcagacgaggcgtgaagcccgcctcgcggatcgcttgttggatgcctgcggcatcgaactggttgtgcgccccggccgaagaaacgacgttctcctcgatcatgatcgaacccatgtcgttggcgccgctgtgcagcgctacctgagcggtggccttgccgacggtgagccacgaagcctggatgttgcggatgttgttcagaaccagttggctgacggcgattatgcgaatgtattccaatggtgaaaagcgggttgcaactccctgccgctccaattcggtgcccgacgagcgaaaaatccaagggatgaaggccagaaagccgtaatgtccttcgggacagcgggcctgcaggtcgcggatgcgcagcaggtggtccacacgctgacgggatgtttctacatggccgtacatcatcgtcgccgaggtcggcaggttgaggcagtgggcttcgtgcatcacctggatccactcctcgaccgaaggtttggcgggcgagatggctttccgcacgccgggatcgaggatctcggccccggcacccggcagggagtccaatccggcggcgatcagccgtttcagggtgtcgagcgtggtgaggccgctgatgcgggcgatgtgcgccacttcgggcgctccgagggcgtgcaggcgtacctgcggatagaggctcttgagtgtcgagaagagctcctcgtagaaatcgatccccagcttcgggtgtagaccgccctgcagcagcaactggtcgccgccgagggcgagcatccgctcgattttctccttgtattcatccagcgtagtgatgaaagcccgctccgtctggtggggtttgcagtggaaattgcagaagtggcagcccgaaatgcagacgttggtgatgttcacgttgcggtcgatctgccaggtcacgacctccaggtcgggcactacggcacggcgcacgcggtcagccgtgagagccagctcctgcaggggggcctgttcgtaaagccaatacgcctcctccgccgtgaggggatcacgcttcagacatttttcgtatatctcttccgcacggttggggccggtcccggcggttcgctgcgtctgttcccggatcatcgcttcgatccttttttgccccctttgcgggacgttttgccgcccttacccggtcgggacgtgctttggcggcgtaccggaatcgctgcgtgcccctttacgtcgtcctcgcgggagtcggccgccgcatcgtgcaccagttcgaaatcgagctggcggcgttgcagatcggcccgcttgacgcgaatacgcacggcatcgcccaaggtgaagatccgtcctttgcggcgtccatagacctcgtagcggttctcgtcgaactggtagaggtcgtcctccatttcccgcagcgaaaccatgccttcgatgtgggtttcgtccagctcgacgtacatgccccagtcgctcatgcccgagatatggccgtcgaagaactggccgattttatcctgcatgaactccaccattttgtacttgatcgaggcgcgttcggcttcggcagcgatcacttcccgctccgaggcgtgtacgcagagtttctcgaaggtgtcgcggtcggccgatttgcctccttcgaggtagcgggccagcagccggtggaccatcatgtccgggtagcggcggatcggcgaggtgaaatgcgtgtagtaggggaaagcgaggccgtaatgaccgatgttgtcggtcgagtagaaagccttggacatcgcacgtacggcgaggttcgaaatgacgttttcctcgatgcgtcctttggcctgtcccagcagcttgttcatctccttggccacggcgcgtcccttgtcggccttgaatacgtagccgaagcgcagaacgaaggtccggaatttttcgagcttctcctcgttcggaacgtcgtgtacgcgataaaccatcgtgcgccgcacggcacggccgttcactttgtgatgtccgcagaattcggcgacctgtttgttggccagcagcatgaactcttcgatgagctggttggcctccttttgctccttgaaatagacgcccaggggtttgccttcggcgtcgagtttgaacttggcctcttcgcgctggaagcttacggctccgcgcttgaagcgtgttttgcgcatccgctgggccagacggttgagcgtcagcacctcttcggcgaagtcgcccttgccggtttcgatgatctgctgcgcctcctcgtaggtgaagcggcggttggagaggatgaccgtgcggccgaaccatttgtccagtacttcggcttcctcgttgagcgtgaagaccgccgagaagcagagactctcttcgtcggggcgcagcgagcaaagttcgttgctcaatttttcgggcagcatcggaatcgtacgatcgaccagatagaccgacgtgccgcgctcctcggcttcggtgtcgatcaccgagcggggttgaacgtagtgggtcacgtcggcgatatgtacgcccaccttccacacgccgtcttcgatcttgcggatcgagagggcgtcgtcgaagtccttggcgtccgccgggtcgatggtgaaggtcgttatcttgcggaagtcgcgccgggcggcataatcggctttggtgatcgtcgaaggaatggcctgggccgcatcttcgaccttttgctcgaaatggtagggcaggccgtattcggccaggatggcgtgcatctcggtattgttctctccggcgcggcccaatacctcgaccagctctccggcggggcttttggaacccagcgcccagtccgtgatgcggatcacgactttgtcgccgtgctgtacgttagggttgtcccgcttggagagatagacgtccatcggcatgcgccggggatccatcttgacgaagatggcgtggtcgctcacgtcggccgtgcccacgtattgcttgcggctgcgctccacgatgcgggtgatctcgccttcgagggacccggcgtgggagcggcgggtgatgacgaactccacgcggtcgccgtccagagcattcagcgaattgcgctggctgacatatacgtcgttttcgaactcctcggagcggatatacatcgctcctgtcgagatcatctgtacgatgccctcctgacggggacgctccttgccgctgagacggtacttttcctgcccgcactcctcgatagtgccctgggcgagcagttccgtgatgatttcacgggtacgaagacggccctccttggtggcgccgcccgaggccgaagccagatgcttgagggagaacttgttgttcgggaattcccggaacaggttaatgatcagcgaagagcggtcgaatgcggccgacttcttcgtatttttcagtttattcatcggttgaaatagttacgggcgaggagttccatgaaccggatgccggtcggaatggccgcctcgtcgggattgaaggtggatgtatgcagttttccggctccgggaccgacgcccaggcggtagaagatcgccgggtagcgggtgccgtagaagccgaaatcttcggaagtcatgcgcaggggcagcatttgaaagggaattccttcggtttcggccagtgcgacggcctgccggatcaactccgggtcattgaccacgcacgggtagccgggggtgaagtgtacccgggttcgtatgccgtacgaggcgtcgttcgcggcggcgagttcttcgatcctgcgtttcacttcggcccgttcccgttcgtcgaaggtacgcatcgttccctccatatagacccggtccgggatgacgttcgtagcgcccgcagcttcgaccttgccgatcgaaacgacccgttcgggcgtgttcagggccgtgaggtgcaggatcagttgtgcggcggcgctcaccgtgtcgcggtgttcggcacgcatggccgcgtggccgcccgcgccttcgagcgtgaggcgcagttcgtcgttggaggccatgtacttgcccgcgcggaagcccagcgtgcccgcgtccaaagcgggttcgacgtgctcgccgacgacggccagcaccgtatagccttcgaaggggttttcggccagcactttggaggctccgccgggattcgattcctctccgggttggaagattccgaaaagagtaccctcgaaattccgctcggcggagagccggagcagggtgccgtagagcaccgctgcgtggatgtcgtgcccgcaggcgtgcatcactccgtcgttctcggaactccacgccgcgccgctctgttcgcggatgggcagggcgtcgatgtcggctcgcagcacgacggctcgccgcaggtcgccgcgtccttcgattttggccagtacgccggttccggcgatcggacggcaggggatgcctgcctcgcggagcgcctcggcgatgaagcgggcgctctccgtttcgcggaacgaaagctccgggtggcggtgcaggtggcggcgaaactctacgggtgtcatggttaagcgtttaatagcaattactttgccctattcggaattagaatacgttgcgggcgatcttgcggatgttgtccgtgcgtcccatcgtgtagaaatggatgatcggcacttcggccgccttgagctccttggcctggtggatcgcccattctatcccgacctcgcgggccgcctgtgtgtcctcgccgcaggcccggacggccttcaccagctcttcgggcaggctgacgctgaaggtgcggggcaggatctccaggtgcttgggcgtcgagatcggcttgatgcccgggatgatcggtaccgtgatgcccgctttgcggcagcgctccacgaaatcgaagtacttgctgttgtcgaagaacatctgggtcacgatgtagtcggctcccgcatcgaccttctccttgaggtactggaggtcgctttgggcgttcgccgcctcgaaatgcttttcgggatagcccgccacgcctaccgagaacttggagtggtggcactcctcgacttcgccgtcgataaattctccccggttcatggcctggatctggcgcaccaggtcggcggcgtgggcgtgtccctgggcgtaggggacgaagcggggttcgttctgccgcttgtcgccccgcagcgccagcacgttgtgcagccccaggaaatccatgtcgatcagcgaatcctcgatgtcgtatttcgaccagccgccgcagatcaggtggggaaccacctccacgtcgtacttgcgccggatcgcggccgagatgccgaccgtgcccggacggcggcgcatgatgtgccactcgcggcttccgtcggggcggatgtcctctttgagggcttcgcggtggaaggtgacgttgatgtaggccgggttgaaatccatcagcgggtcgatggctccgaagacgctgcgcgtaccgtcccccttcaggggcgggagcagctcgaaggcgaaacgggtcgtgcgcgaagcgacggcgccctgtatgagatccgtaatattcatcagatgttattgggtatcagtttttcgatcgtttctatgtccatgttgcggcgtgcggcgtagtcggccagttgctctcggtcgattcggccgacggagaaatattcggcgtcggcgaagaacaggccgcagagcgcctcctcaggtgtaatcatatagttgtcgttcagacgcatggcggtcgtcttgtcggcggccagcaggtcgaagacctcgcgtttgagcgagtggtcgggacaggccgggtagccgaaggccatgcgccgaccccggtatttgctgcggatgatctgttcgggtgtgagcgccggaccggtttcgtaaccccacatctggcggcggatgaagatatgcacccattcgcagagggcttcggtcaggcggtcggccagcagcttcgagaggatggcgttgtagtcgtcgccctccgcgcggaacttttcggtcagctccttgagccctatgccgcccgtgagggcgaaggccccgatatagtcggttctgcctgccttttcgtcggcgatgaaatcggccagacagcgggcctgggcttcccggaccggggcctggctgcgcagcatcggcaggatgtatttcttgtctttcgggccggtgaccacgatgtcgtcgccccggctgacggctgcgaagatgcccgctacgccctggagggtgaggagtttttcttcgcggatgcgggccagcatcttttgcgcgtcgtcgtagagcttgcgggcttcggcgccgtgttcggggttttcgaagatctccggtacgcggcccttgagcccccacgccgggaagaagaagttccagtcgatcagcggctccacatcggcgatacttatgtccggaaacaccagccgtcccgtatgggccggaacagcgatttcggacgcgggtttcggcacgcgcagcttgcgcacctgaccgaagggtaggatcgtgcggatctcctcgcggcggcggtactggtcgcgcagggtctgttgctcctcgcgcacgcgagccagatactcttcccggccgggaccgagcagttcgccgaggattttgttgttgcggctggcgttgtcggcatggatcaccgggcccgagtaggtcggagctatttttacggcggtgtgtacgtccgaagtggtcgcaccgccgatcagtacgggaatttgcaacccccggcgttccagctcttcgcagacgtggatcatctcctcgagcgaaggggtaatcagtccgctcaggcagatcgcgtcggcgccccaggcgacggcttcgtcgatgatgcggggacactcgaccatcacgcccaggtcgcggatcgtgtagccgttgcaggccatgactaccgccacgatgttcttgccgatgtcgtgtacgtcgcctttcacggtagccaccagcaccttgccggcactcttggcgttcgcttcggaaccttgctcgatgtagggagtcagtacggcgacggcttttttcatcacgcgggcggtcttgaccacttgcggcaggaacattttgccctgcccgaacagattgcctacgacttccatggccggcatcagcagccggtcgatcactgccaggggcgagcccagcgtgcggtagccttcgagcgcgtcctgctcgatgtagtcggccacgcccttgagcatggcgtattcgatgcgcttgccgagcggctccgagcgccaggcgtcggtatgctgcgtctgcgtcgcggcggttttggtgaattgcgaagcgtattccgtgaggcgttcggctgcgtctgcgcggcggcagaggatgacatcctcgactcgttcgagcagttccggttcgatgtcgctgtagatttgcagcatctggggattgacgatcgccatgtccatacccgcttggatggcgtggtagagaaacaccgaatgcatggcctcgcgcacggcgttgttgccccggaaggcgaacgagagattcgacacgccgcccgaaatcttggcgtgcggcaggttttgcttgatccagcgcacggcttcgatgaaatccctggcgtaggcgtcgtgggcttcgataccggtggccaccgcgaggatgttggggtcgaagatgatgtcttcggcggggaatccgtcgtcggtgaggagtttgtaggcccgctgcgccacctcgatcttgcgggcataggtgtctgcctgtccctgttcgtcgaagagcatcactacggcggcggctccgtaacggcggatgaggcgggcgcggtgcagaaattcctgcttgccctccttcagggagatggaattgacgacgctcttgccctgcactacccggaggcccgtttcgagcacctcccatttcgaagagtcgatcatgacgggtactgcggcgatttcgggctcagaacccatcaggttgaggaagtcgcgcatggcttcgggaccgtcgatcaggccgtcgtccatgcagacatcgacgatctgagcgccggcttcgacctgggcacgggccaccgagagagcctcctcgtaattcttttcgcggatcagccgcgcgaacttggccgagccggcgacgttggtgcgctcgccgacattgacgaagttggcttcgggtacgatccgaagttgttccagcccgctcaggcaggtcacgtgccgccgctgcggcagggggcggggcgcatagttgtttacgatcttcgccagttcgaagatgtgcaggggcgtggtgccgcagcagccgcccaccagattgaccaggccgcgccgcatgtattcctctacgtcggcggcgaacatcgcgggcgtctcgtcgtagccgcccatgacgttcggcagacccgcattgggatagaccgccacgcggaattccgaaacagcggccagccgctccaggtagggcagcagggccttggcgccgaacgagcagttgaggctcacggccagcggttcggcgtgtgcgacggaggtgtagaaggcttcgatggtttgtcccgccagggtgcgtcccgacgaggtgagcgtgccggagacgatgaccggcagtcgcatgccgcgttcggcgaagagggattcgatggcgaagatcgctgccttggcgttcagcgcatcgaagacggtttcgagcatcagcagatcggcgccgccgtccatcaggccccgagcctgattgtagtacgcctgcgagagctgttcgaaagtgaaagcccgggcgccggggttgtccacgtccgccgacatcgacagcgtatggctcgtcgggcccatcgagccgcccacgaagcggggcttctgcggattgcgggcggtgaaggcgtccgccgcttcgcgggcgatggctgcgccggcccggttgatgcggtacgcctccgctgccagtccgtagtcggccagcgaaatggagttggcgttgaacgtgttggacgtaattacatccgatccggcctggaggtatttctcgtggatttcgcggattgtttccggacgggtgaggttcagcaggtcgttgcagcctctgagaagtttttcgctcgcggcgaactccttgccccggtagtcggcttcgtccaggccgtattgctgtatcatcgtgccgaatccgccgtcgagcagcaggatgcggtgttcgagttcgtgtcgtatgtcgcggttttttgtcacgtcgtgtggtattttattggggtatgatttcgatttcgaagagtttgctccatcttttgcctgtcacgaagatacgttccgaggccgcgtcgtaggcgatgccgttcagtacgtcggtatccggggcgatctcttcgtccgggagcaggccgcgcaggtcgatgaccccttcgacaatgccgctggcggggtcgatgatgacgatctggtcggtgacatagacgttggcccagatcttcccgtcgatccactccagttcgttgagcagttgtaccggggcaccccggaaggtgaccggcacgctgcgttgcacccgaaaggtttccggatcgaggatgcgcaggtattcgctgccgtcgctcatgtagagccgctcgccgtcggtcgtgaggccccatccttcgcccgcataggcgaaagtgcggagctgccggcccgtcgccgcgtcatagacgtaggctttgttgttttcccaggtcagttggtagatcttgccgtcgagcagcgcgatgccttcgccgaattcgctgcggggcagcgtagccactacgtccgtgcgtcctgtttcgaggtcgatgcgctgcaggcgggagtgtccgtattcgcccgtaccttcccacatcactccgtctgcgaacaggagcccctgcgtgtagctgtcggtcgaatggggatagctttcgatgacccggtaggtgtaggtgcgcggcgcggcgggggtagcggccggggtttccgttcggagggttttcgtgcgtcccgagcaggcggccagcgtcatcgccagcagtccgatccatgcgatttttgtcattggattccgtatcgtttgtatgctgtccggctgcggcgttggccgtttatagccggtatgtccttattataataggcaacaaagatagctatttttcggaaaaagacgtcgatttcggcgcccgaattacggatcggaggggctgccggtccgggtgcttttccccgaagccctttctgaaagaaaaacggatcggtgcggagatatttatcgggtgtttgttgcttgctaatgaattattttgtacttttgccgacccgaactgtaacgtataaaacaactgaaatatgaatatcgtaagagaacagcgcgagcagaataactcgctcatcaaggtgaccgtaggcgagaaggattacggcgatgcggtcgaaaaatccctgcgtgagtacaaacgcaaggccaatattccgggcttccgccccggtatggtgccgatgggcgtgatcaagaagatgtacggcaagggcgtgcttgcggagcaggcttaccgccaggcttcggaagcagcgttcaactatctgcaggagcagaagatcgattatgtcggtgacgtgatcccttcggaggagcagggcgacttcgatttcgagaacgggaccgaatttgaattcatcttcgagatcggcgaagctcccgaggtgaaactcgagctgtcggcgaaagataagatgacctactacacgatcaaggtcgataagaagatgcacgacgattaccgcagcaatttcctgcgtcgtttcggccgtctggtggataccgacaaggtaacggcggacgaagcgctggaggtgacgctcgacaacggtgatatgaagattgagggcgcttacgtcggactgatttcgatgaacgaggaggagcgcaagcccttcatcggcaagaaggtcgggttcaagacgcaggtcaatgtcaatgagctttacaagactccggcgcagcgtgccgccgtattgcaggtcaaggagaacgaattggagggtatcaaacccgaattttctctcgaaatcaccaagatccgcaagttcgcggaaccggagctgaacgaggagttcttcaagatggcttttcctgcgggcaacgtcaaaaccgccgaggagttcgaggcgttcgtcgatgccgaaatttcgaaagagctgcgccgcgagagcgactatctgttcacgttgcagttgcgtgatttcctgttgaagaaagccgggctgaccatgccggtcgagttcctcaagcgctggctgtacgtcatcaacgaaggcaagttcaccaaggaggagatcgagaaggatttcgacgctttcgtaaaactgttcacttggaattatctccagaaatatttcatcaagcaggataaccttacggtaacccccgaagaggctactgcagaggccaaggcgttggcacaggcccagttcgctcaatacggattgccgacggctccggaagatatgctggccaattacgccaagaagattctcgaggaccgcgagcagggacagaagatctacgagaagctgtatgagatgaaggtggtcgaggacgtgaagtccaagatcaaggtgaccgaaaaggccgtttctgccgaagagttcgcaaaactggccaaggagatttaagaaacagcggaaaattggtatccgatcagagctttgagggtttgatttttgcaatcactccctcaaagtctgtttagtagtcatacttctgttttttgcttcttccctcgtttttgccggattcgagcctgcatcgtgtgttggccgggtacgggaaatcgagtaggaccggaggcaagtcgcggaaaaatttttgaaccggcttccgatgttttttattaacttgcaaactgttcggttatgaatgaatttgaaaaatacgccacccggcattgcggtatcaatagtctgaaactgcatgatttccgctcgcagtacgcggcctacgtgtcgccgacgatcatcgaggagcgccagttgaacgtggcgacgatggacgtcttttcgcgtttgatgatggatcgcatcatctttttgggggctccgatttacgacgatgcggccaatatcatccaggcacagctgctgttcctggagtcggccgacccggaaaaggacatccagatttatatcaactccccgggcggatcggtgacggccggtctgggaatttacgatacgatgcaactggtgcagcccgatgtggcgaccatctgtacgggactggccgcttcgatgggcgccgtgctgctgaccgccggtgctgcaggcaagcgctcggcgctgcctcattcgcgggtgatgatccatcagccgctgggcggggctcaggggcaggcgtcggacatcgagatcacggcccgcgagatccgcaagaccaagcaggagctgtacgagatcattgcggcccattcgggcgctccgatcgagaagatcgaaaaggatgccgaccgcgattattggctgtcggcccgggaggccaaggagtacgggctgatcgacgaggtgctgaccaagcggggataatatttctgtttcaatctgcaggggacggtcgatttcgggagagaaaatgcatcgtttccgatcagcggaggcagagcggggcgctcgataggccgagcggaataaatgaagaacccggttcgatatttccggtgtgcgacgtcggaacgaggccgatcgacggccgggtagagatgatgacgggagtttgttttcgactttatcccggcagaggctcgtccgaaagttcgaccgggaacgagaacgaaattcgaaggaaaactaaagacctatggctaaaaattacggagaagacctttacggcaacgagagcgatgcgtgttcgttctgcggggccaaacgccgcgacggtgcgatcctgttgagttcgtccaagggttgcaatatttgcagcaaatgtattgcgaaaggataccagatgctcatcgaaaacgatgtgctgcatgacgaagccgcatcccgtcgcaaggagcaaaagaatacttcgttgaaattcgaggatttgctcaagcccaatgaaatcaaggagtttctggatcagtacgtgatcgggcaggacgatgccaaacgctatatgtcggtggccgtatataatcactacaagcggctgctgcatgcttcgggcgaggcgagcgaagtggagctcgacaagtcgaacattctgctggtcggcccgacgggtaccggcaagacgctgatggcccgcacgatcgccaaattgctgaacgtgcccttcaccatcgtggacgctacggtacttaccgaggcgggatacgtgggcgaggatgtcgagagtattctctcgcggctgttgcaggtggcttcctacgacgtggagctggcccagcggggaattgtcttcatcgacgaaatcgacaagatcgcccgcaagagcgacaatccgtcgcttacgcgcgacgtatcgggtgaaggagtgcagcaggctttgctgaagattctggaaggcacggtggtcaatgttccgccccagggcgggcgcaagcatcccgagcagcagttcgtgcaggtcgatacgcgcaacattctgttcatctgcggcggagcgttcgacggcatcgagaagaagatcgcccagcggctcaacacccgggcgatgggttacggacggatgaatgccgattccgtggaccgcaacaacctcatgcaataccttatgccgcaggacctcaggtcgttcggtctgattcccgaactggtgggccgcctgccggtgctgacctatatggagccgctcggccgcgaggccctgcgttcgatcctcacgcagcccaaaaatgccatcatcaagcagtatgaaaagctgttcgagatggacggcgtgaagctcgtgttcgacgacgaggtgttggactatatcgtcgataaagccatcgagtaccggctcggtgcccggggattgcgttcgatctgcgaagcgatcatgatggacacgatgttcgatatcccctcttcgggagagcgtcgcttcgaagtgaccttgccttatgcccgggaaaagttcgaaaagaagaaatttttggcgctcaagcaggtcggatagaccggatttgtattaaatttgtaccaccgaacgcgggactgcggcgggggaccggtgtgcagtcgcgctcgttcgatccgaacgagcagaatgaggaaagaaggaaggaagatcttcggcttcgtccttcgtttccatatattttctgccggtaacgggccgagttgtgcatattcggccgattcgtccgggatgggcgccgaatgtcggcccgggctgtgaggccaatacataaaaaatataaaagcatacaatctcttatggttactaaatccgaactcacgcgcgttgcagacaacatccgtatcctgtctgcagcgatggtcgagaaagccaaatcgggacatcccggcggcgcaatgggcggcgcggacttcatggcagtactttacaccgaattcctccgctacgatccggatcagatggattatcctttccgggaccgtttcttcctcgatccgggacacatgtcgccgatgctctattcgacccttgcgctggccggaacttatacggtggaggatttgcgtaacctgcggcagtggggcagcgtcacgccgggtcatcccgaagtggacgtgctgcacggtgtggagaatacgtcgggtcctctgggccaggggcatgccatggcgctgggcgccgcgatcgccgagcggttccttgcggctcgtttcggggagtggcagtcccacaagacctatgcctatatctccgacggcggtatcgaggaggaggtgtcgcagggcgtgggccgcatcgccggccacctggggatgaacaatctgatcatgtactacgactcgaacaacgttcagctttcgaccaaggtcgatgaggtggataccgagaacgtagcgatgaaatacgaggcgtggggctggaacgtcatcaccatcgacggccatgacgtagagcagatccgcgaagccctcacggccgccaatgccgagaaggagcgtccgacgcttatcatcggccgtacggttatgggcaagggtgcggtcgcggccgatggatcgagcttcgaggacaaggtttcgacgcacggtcagccgctgacggctgccggagccgatttcgccgctaccgtccgtaacctgggcggcgatgcagaggatccgttcaagatcttctccgagagcggcaaggtgttcgacgcccgccgcgaagagcttcgtgaatgggtgcgcacgcagcgcgagagggagaagacgtggcgttccgagcacaaggagctctcccgcaaactcgatcttttcctctcgggtaaggtgccggagatggactacaagggactcgagatcaaacccgacggtgcgacccgcgccgcctcggcttcggtgctctccttctatgcggagcggatcgaaaatatgatcgtcgcctcggccgacctctgcaattcggacaagacggacggctacctcaagaaaaccaaagccttctcgaagggtgatttttcgggcaagtttttccaggcaggcgtttcggagctgacgatggcctgcatcgccaacggtatggcgctgcatgggggcgtgattccggcgtgcggtacgttcttcgtcttctcggactatatgaaacccgccgtgcgtctggctgccctgatgcacctgcatgtaatctatatctggacgcacgactcgttccgtgtgggcgaggacggtccgacgcaccagcccgtcgagcacgaggctcagatccgtctgatggaacatttgaagaatcaccggggggagcgttctatgttggtgctgcgtccggccgacggcgaggaaaccgttacagcttggaaattggcgatcgaggagcatcgtcccgtcgcgctgatcctgtcgcggcaaaatattaagaatctgcccgcactcaatcacagccgccgtgaggaggctgcccagctttcgaaaggcgcctatatcgtagtcgatgccgccaaaccggctgtggtgatgctcgcttcgggttccgaagtcgctacgctggtcgaaggtgccgagttgctttcgaaggagggaatcgcggtccgtatcgtgagcgtgccgagcgaaggacttttccgcgaccagcccaaatcctatcagcagaccgttctgccacagggtgtggtgcgttacggccttacgtcgggtctgcccgtgacattgctgggactggtaggtgaaaacggtatgattcacggtctggatcacttcggttattcggcaccctacaaggtcctcgacgagaagttcggttacaacggccagacggtatatgaagaggtgaagaagttgatcggtaaataagccggttgtaaaacggatagaagacaggcccggatgccgataggcgtccgggcctgtcttctgtttgttccgtcgttctcccgttgattttttcacgggtctttccgctgttttttgcacccgtcgggtttcccgaagacttgtccggcgatgttcggggaagaacgggtgcagctttgaaatcggatcatggacagagtgccttggggcggccttttcctgttattgttgataacttttccataaaatgccggaggggcggaccatcgaatgcgattaaaccctatatttgttttcggtatcggttcccgatgtggagggcgaatccaccgggattaaaagggaatcctgtgaaagtcaggaactatccccgtagctgtaagtttcttttgggcggtacattctctcagccactggccgttcgggccgggaaggcgtgccgtccggaacaagtcagaagacctgccgtaccgggacgagattcgttgctttcgggtgaaaagcgtcggaacggtttcggatgcttcgtcgtatctattgccggttctgtaaattccattcctgcctgtgttgtatcgggtcggatcgctgcgaatccgtcgttcagaagaggtgtatttcggtttttccgaagggtcggtaaaaagtcgtcggatcggacgacaccgatctggccgacgaaggcgtacggtatggctcggaacgtgcggcttgtcgtgtttctgcggagaaagcccggcggctgatatttgttgccgtcgagccgggtcggaatcggccgaatttccgtcggtggagttatcggtgtggggaattcgagcgttgaaagtatgagtataataatataatatttgaggagaagtttaatcgttatggaaacattcattgtcaagagggacggaacgcgggaggcgttttcgatggagaagattcagcgggcgatcgccaaggcattcctttcggtcgggagtttcgctacgcaggacgtgatcaccaacatcctgagccgggtcagcgtgaccgacggcatctcggtcgaggagatccagaaccaggtggaggtcgcgctcatggccgagcgttactacacggtagccaaggcttatatgctttatcgccagcggcataccgaggatcgggaggtgcgcgacaagttgcagttcctcatggagtactgcgatgcttcgaacgccgcgacaggaagcaagttcgacgccaatgccaacgtggagaacaagaacatggctacgctcatcggcgagctgcccaaatcgaatttcatccgtctgaaccgccgcatgctcaccgaccgcctcaaggagatatacggcaaggagttggcggacaagtatatcgagatgctgaacgaccatttcatctacaaaaacgacgaaacttcgctggccaactattgcgcttcgattacgatgtatccctggctcatcggaggaacgatttcgatcgggggcaattcgaaagccccgaccaacctcaagtcattctgcggcggcttcgtgaatatggtttttatcgtgtcgagtatgctcagcggcgcctgcgccacacccgaatttctgatgtatatgaactatttcatcggccaggagtacggcaccgactatttcaaacgggcggacgaggtggtcgatctctcgaagaaacggcgcacgatcgacaaggtcatcaccgactgtttcgaacagatcgtctattcgatcaaccagccgaccggagcgcggaatttccaggccgtgttctggaacgttgcttactacgaccgctactatttcgagagcctgttcggaaatttcctcttccccgacggcagcaagcccgactgggagtcgctcagctggctgcaaaagcgtttcatgaagtggttcaaccgcgaacggacccgcaccgtgctgaccttcccggtcgaaacgatggctttactcacggaaaacggtgacgtgaaggacaaggagtggggcgatttcacggccgaaatgtatgccgagggacattcgttctttacctacatgagcgacaatgccgattcgctttcgagctgctgccgcctgcgcaacgaaattacggacaacgggttcagctacacgctcggcgccggaggcgtatcgaccggctcgaagagcgtgctgacgatcaacctgaaccgttgcatccagtacgccgcacgtaagggtatgccctatcagttcttcctcgaggaggtggtcgatctggtgcacaaggtgcagttggcctacaacgagaacctgaaatacatgcagtcgaaggggatgctgcccctgttcgatgcgggctatatcaatatgtcgcgccagtacctcactatcggtgtgaacggactggtcgaagcagccgaatttctcggcattccgatcaacgacaatcccgattacgaacgttttacacaggaaattctcggaatgatcgaaaagtacaacaagaagtaccgctcgaaggaggtgatgttcaactgcgagatgattccggcggagaacgtgggagtgaaacatgccaaatgggacaagcgcgacggctacaaggtggggcgcgactgttacaacagctatttttacatcgtcgaggatgagtcgctcaacatcgtggacaagttccgactgcacggccgcaaatacatcgagcacctcacgggcggctcggccctgcacatgaacctgcaggaacatttgagccgggaacagtatcgccacctgttgcgcgtggcctcgcaggagggatgcaactatttcacgttcaacatcccgaatacggtctgcaacgattgcgggcatatcgacaagcgcaacctcaaggcgtgtccgaagtgcaacggcaggaacctcgattatctgacccgcatcatcggttatatgaagcgtgtcagcaacttctcccaagctcggcagcaggaggccgcgcgtcgtcactatgctacgcctggccagctttgatgtggtgttccaggagattccgggcgaagtgaccctcgctctgaatctttcggggtgcccgaaccggtgcgccgggtgtcacagtccccatctgtgggaagaggtcggggagccgttggacgataatttgctgaatagtttgttgtcgggatacggaaatgcgattacctgcgtttgttttatgggcggcgatgcagcgcccggcgatgtcgcgcattggagcgcctgtgtgcgggctgcgaccgggggccggctgaagacaggctggtattcggggcgttctgaattggccgcaggtatcgacccgcgcagttttgattatatcaagctgggaccgtatgtcgcacatttgggaggcttggattccgcttcgacgaaccagcggctttaccgggtgacggacggcgaaatgaaggacattacggcggagttgaggaacagggatcgtatgttattgggttaattgaatcatattaaaaggctgcgagggctgtgaacaaatagttcacggccctcgcggtgtattgccgggcggttcggggacctgcatggaacgaccgtcgcgaagtttgtttttcggtttgagaagcccgaaagaattcggtggttcgattccatcgggagctaacaacaaaaagtccccgaaaaggggactttttacttgtgcggtcggtcgcgttatagtccgaactcttgcttgatcagatcgacggcatcgagcttttcccagccgaagaattcgatctcgcgttccacctcgcggccgtcctcccacactttctccttgcgggtgtaggggcggttgccgaaatgtccgtaggatgccgtcgcttcgaagatcgggtttttgaggccgaatttcttcacgatagccgccggacgcaggtcgaagagcttggcgatacggcgggcgatctccccgtcggtcatgtccgcgagtttcggattgcggctgcataccgcaccgtgcgtatcgacgaagacggagatcggttcggcgatcccgatggcatagctcaactccacgagaatttcgtccgcgatcccggccgccaccatgttcttggcgatgtagcgggctgcgtaagctgccgaacggtccaccttcgaggagtccttgcccgagaaggcgccgccgccgtgggcaccgcgtccgccgtagctatcgacgatgatcttgcggcccgtgagtcccgtatctccgtgcgggccgccgatgacgaacttgcccgtgggattcacgtgcaggatatagtcgtcgccgatcagtcgcgccaacttatccttggcgcgttccagacgggccttgacgcgtggaatgaggatcgtgcgcacgtcctcgcggatcttctcctgcatgcgtttttcggccatcttctcggtgacgcccttgctcgtggggatgaaatcgtcgtgctgggtcgaaaccacgatggtatgtacgcgcagcggacggtgcgtctgttcgtcgtattcgatcgttacctgcgacttggcgtcgggacgcaggtaggtcatcacctgcccttcgcggcggatgacggccagttccttgagaatgacgtgcgagaggatgagcgtcgcaggcatgtattcgcgcgtttcgttgcacgcatagccgaacatgatgccctgatcgcccgcgccttgttcttcttcggcctcgcgtacgacaccctggttgatgtccggagactgttcgtggatcgcggagagcacgccgcaggaattaccgtcgaactgatattcgcttttggtataaccgatacggttgattacgcggcgtgttacgtgctggatatcgacgtaggcgctcgaacgcacttcgcccgcgacgacgaccagaccggtggtgcagagcgtttcgcaggctactttggagttggagtcgtgacgaaggaattcgtcgagaatggcatcggaaatctgatccgaaactttgtcggggtgtccttcggacacggactccgacgtaaataaaaatcccattttacatttattttggaagttaaacgtataaaatggggaaaaattggctgctggaataaaaaagctgttttagctattttttattgtggtttgcaatcagtcaaatctttccacattccccgccgatcggcgaggactgcaaaggtaaacataaaaaacggggaataaaaacttattccccatattatcttacgaaaaataggtgccgtcttatagggccttggtatctatcgggttacgttcaaggtcggcagattcaggatttgggctcgggtgaattattctgtgtgccgacggcggagttttcgcttcgcgacacgtctaaaagcaggaaacacaataatcgtcttttctgggcgttctgtaactaaatagaaacgctcaaacagaaacagcctatggaataaaattgcctccgtaataaaaccagttaaattatttcaatattggattatgaaaaaggcattgttattattaggtatgattgccgcaggcgccgcatccggcggtgtcgtcgcctggagtattttatcgccggccgaaaagaacggcacgcatgttgttacgccgcaaagcggggcagtgtctgacgaccccttttctcaggcgggaacccatttcacttcgtatcaggccgagcagtatccggatcttacgtatgctgccgagaatgctgtcaaggccgtcgtgaatatcgaggtggttcaggagatcgaagttcccgagcggcagtacgatccgtttttcgaatttttcggtattccccagcagggccggcgcggcccttcgacacaggagcgtcggggcggaggatccggcgtgattatttccgcagacggttacatcgtgaccaacaaccatgtggtggacgaggctacgcgccttcgcgtgaagctgagcgacggccgcacgttcgacgccaaggtgatcggtaccgaccccacgacggatgtggcgctggtgaagatcgaggccgaggacctgcctacgttgcctttcggcagttcggattcgctccggttgggcgaatgggtgctggccatcggatcgccctataacctgcaatcgaccattacggccggtatcgtgagtgccaaagcgcgtcagttggatgtcattccgagcgaattccgcatcgagtcgtttatccagacggatgcggccgtcaatcccggtaattcgggcggtgcgttggtcaatacgcgcggcgaactggtcggtatcaataccgtaatcaagacgatgacgggtagctatgtcggttattcgttcgcggtccccgaaacgatcgtccgcaaggtggtcgtggatctcaaggagtacggcgtcgtgcagcgggctctgttgggtctggcattccgccccatagatcagaatttcatcgatcagatgggcgaggaaacgggtatcgaggagttgggcggcgtttatgtcgccagtgtgtccgaagggggcgctgcctcgcaggccggtatccgcaagggagatgtaattctttcggtcgatggcgtggagttgaacgaggctgcgacgcttcaggagcagatcggcaagcaccgtcccaacgacaaggtaaaattaatgataaaaaggtcgggttcgatgaaacaaatcgaggtgaccttgcgtaataaagcaggtaagacggaactcctcacgcgggacgacgtcgatgtgatggaagttttgggtggaaagttcgccacggccgatgaacgtctgtgtcgccgactggagatcagaggcggtgtggaagtgctggcaatcaaggcgaacggtattctgtcgaaggcacgggtaagaccgggattcgtgattacccacatcaacgacaagtccgtgcgttcgctctccgatatgcagcggatgaccgataaggttcgcagcatcgacggagtatatcccgacggacgttcggcgagctatgtgcttgtcgaatagggaagcgccaggaaagccgggtatgttttaccgttttttattgccgtagtttaagaatattcttataaaattaaatatgcgtcagttaaaaattacgaagtccatcaccaaccgtgagagcgcgtctttggacaagtacctgcaggaaatcggcaaggaggagctcattacggttgaggaggaggtggaacttgcccagcgaatcaagaagggtgaccaggaggcattggagaagctcaccaaagccaatctgcgtttcgtcgtgtcggtggccaagcagtatcagaatcaaggcctcagtctgcccgacttgatcaacgagggaaacctcggtcttatcaaggctgcggagaagttcgacgaaacccggggtttcaagtttatttcgtatgccgtgtggtggattcgtcagtcgatcctgcaagctctggccgagcagtcgcgtatcgtgcgcctgccgctcaatcaggtgggctcgctcaataagatcaacaaggctttcgcccgtttcgagcaggagcacgagcgcaccccttcgcccgaggagttggcgaatgagttggagcttcccaaggagaaggtgaccgatacgctgcgtgtcgccggccgccatgtttcggtggatgcgccttttgccgacggcgaggacaacagcctgctcgatgtgctggtgaaccccgattcgcccaatgccgacagagggttgattaacgagtcgctctcgaccgaggtggatcgtgccttggaaacgctgaccgaacgcgagcgggatatcatcaaatatttcttcggcatcggctgttcggaaatgacgctcgaagagatcggcgaaaaattcgacctgacgcgcgaacgtgtacgccagatcaaggagaaggcaatccgtcgcctgcgtcactcctcccgcagcaagttgctgaaatcttatctggggtagagaaccccgtttatgataaagccggaacttctaaaagttccggcttttttattccatttccgaactttgttttgcaattgtcgccggtgacagtcggtgcagggcgattacctgtcgtcggaatattcgtcttcggtcatcatacgctggatgcgcaggtttttacccaagaccagggtgatggacagcaacgcgagagcacagacggcgcaaagagccagccattcgagccgtcccaatatgcccgatagcaggacccccgctacggatagtaccaggaccgtgtaacagatgacgagagtaatcttaagtggttgcagcatatttttatggtggcgattatattttgcaatgtatccttatccgacggtcgcagcattgaattcgaggggcgctattcgcggcctgtgcccgcatttgcaatgcagccctttctaaatcctcttctcggagagggcttgggtcgctgtgctttcagagaggtactctaacgcgtataatcaggttttagaagttattatgcttaccacaaaatcggtgcctttccgatgctttgcagatattcgttggcccgggaaaagtgtttgctgccgaaaaatccccggtaggccgacagcggggagggatggacggctttgaggatgcagttgcgctggggatcggcgatggcgcctttgcgctgggcgtaacttccccacagcatgtaaacgatgccttgcttgcgctgtgcgatggcccgcacgaccgcatcggtgaaagtttcccagccgtgtcctgcgtgggaggccgcttcgtgcgcccggaccgtcagcacggcattgagcagcagcacgccctgttcggcccagcggtcgaggttgccgctcgtgggaatcggcgagccggtgtcgtcggctacctcctggaagatgttctgcagcgagggtgggaacggcacgccgtccgccacggagaaacagagtccgttggcctgtccttcgccgtgataggggtcctgtccgatgattaccactttgagtttgtcgaacgggcatttgtcgaaggcacgaaaaatgttgcttcctctggggaatatccggcgggaagcgtattcttgccgtacgaagtcggtgagttctcggaaatagggtttttcgaactcttcggaaagaatctctttccagtccgaagcgattttaacatccatggctggtattgaattaggctgttatatatttcgagtaccacgaccgttttttgttgatctcggcaggcagccctcgatcctgcggggtgtcgtttcgttctgaccttcttcccgggaagagtttcgacttttcgtcgaagcatatcggtcggtttcgagccggagcaggtcggtaatcgagctatataatcaggttaaatttttgctaaaatacaaagaaagttcgaaacggcgtgtcggaaatgcgtaaatttgaaaagtcgcatcaaaagaatatatattatttgttatgaaaaaaattgtaattaccatgctcgtcctgttgtcggcggcctatgccgtcgggataggaggcggggaggtcgcccgtaaactggaccttcgaccgtcgcaaatcgttcccgcagccgacacgttgccggttcggaacctgatctatctgatcggggacggtatgggattgagtcacgtgtcgatgttgatgctcgaggagggatatggtacgaccgctttcgaccgggcgcagaacatcgcattgattactacttattcagccaacaaccgggtgacggactccgcagcggccggtacggcgctggcgacgggacataagaccggcaacggtatgctcggtgtgctgcccgattcgacggctgcggagtcgattatggcggatgcgatccgagccgggatgccggcggggatcgtcgttaccagtactctgcaacacgctacgcccggcgctttctatgcccatgtgccttatcggcgacagtatcagcgaatttccgatcaactggccggaagcgacttgacggtggccttcggcggcggattgaagtatgccgaagcgtcggagcgggaggacggtgtaccgggcatcgagcgccttcgggatcgcggtttccgggtgctgaccgatccctcgcagctcgataccttgagccggggacctgtgatgggattctttgccgacggtcacctgccgaaaatgtcggaggggcggggcgattatctggagcgggcgatccgcaaggcgctggagattctgtcgcgagaagccggcgagcgcgaccggggctttattctgatggtcgaaggatcccagatcgatctgcgggctcacgataacgatgccgaaggcgtcctggcggagatgcgtgatttcgaccgggcggttgccgctgcgatggatttcgccgaccggcatcctgggacgctcgtggtcgttacggccgatcacgaaacgggcggtctttcgattccttcggccgatgtcgatttcgagcacgaggaggccgggatcgagtaccgtttcagcaccggcggacatacggcggcgatggtgcccgtctatctgtacgggacaggcgccgaacggattaacggcgtactggacaatacggagctggcccttcggctggcagggacgctcggtttgagataagacgatgcggaatttcgtgcggacttcgcgaaatgttgcgagggagaatggagtaatttaatttatagcgtattaaatataaaaattataaagatgttaccactaattttcaaataattgttatctttgtaacatcgagtattcgatgacatatttttgatgaaagtgtattagtttcagccttggttcgaaatctggtaaatgctattttgtctattctgctgtatattaataagataacaattataacgccttgcaaaagaaccagaatagaaacaaaatcggtattttaggagattctttggtttttactttacacttgatttcatcccttgcacttggttgcacacaaagtgtttcttaaagctactttccccgctactgacctctctcatcaagaatatcgattggtgatctatagcgaattttgcagttaaaagagaaaataggcaaatgtacattttaagattatacgttcattgaaactttttgcactatgcaaaggtaagtacttctaccaaatcataggcatatggaaaggcaaatatgcttacctaaatttagtttactttggttttgcctacatataggctaatagagtaaactaaactgaattttcaacgatttctatcatctaactaaatacaaaatatacagcataagaggaagcaaatctactatgtatttctcttttcgctgcaatcctattcacacagcaggactacttcaaggcccaccgcaaggcgagtcgcgaggaggagattgcgcaccatggcaagcccgtcggtccgtgccggtacgtcgctacggagtcggccgagtttccggattccggaccgacttcaagccattaacaaaaggggccgtataaactcgttatacagtccctttacttattctgcgcgaaaaatattccgacgctatgtcccggttaagactattcgggtattacttgccaagcctgctgtccgttgtaggtcgtttctaccgacttgtagcccggagcgacaaacgtatcgtccgcttcgcccgtgttgtcgcccgttgcggggttgtagttaatgaagattcctccgtaaatttcaaccgtggcacggccggctttccggtcggcatcctgaatgttgatgaccggataccaaccgttgatgggattgcccttcgtttcgaatacaccgccataaatcttcaggtgagctttttgagaggggcgtgccgttgctaccaaaatacacgagttggcaattccggaagcatccgtaccgacggtgaagtatccgtccttgatcgtcgtagtgccctccgcaatacggatcgctgcattggtccctttgctgccgctgctgccgtcaacggtaatggtgccgtcgataaccagatcggggcaaccgctatagatgcctgcaacgtttgtggctgtactgtttttcggtccgacgatgaagccttttccgctaataaccatctttttgcacgatttgctcacttggatgcactgttgcaattcggagccttcctgcgctgtcaataccgcaccctctttcagagacaaggtggcggaagcgaccgaggagatatagggagaatcatcgatagtcatactgcgcgaaacgatggcgatatcgccgcttttcaaggctgattccagatccgcaggcgctgctacctccgtacccttcaccaccgtgtaagttccgttaggagccggttcggcagaggtcttgatcgccgtgtagccctccgcaacgaagtttttcaccggattttccgtcatcgaactcgacggatcgtaattgatgaacgtaccgccgtatacgttgatggcggcacccgagccgtctttcaggttcagcacccaataaccgcggttgttggcgctcttcgactcgaacgtaccgccgtagatgttgataacggcctgctgatccgcgtagataaggtcgagctgtgcattatggtcattatagtcctgatcgttgacaaaattaccgccgtagatgttcaccttcgcatcgccgtaagcatatacggccatgcggtagccgtcttcgttgggcttggttccgatagccttaatgttgccgtcgcctttgatattcagggtagcgccgcctttcacttcgaatacggtggtgttgccatagcgtggatctgtatcaggaagcgaggtcgtgttgatgatgtccttgccgttcaggtcgatctcgactgtcttgccggtttccacgaccagcggggcttcgaccgtcacgtcttccgacagggtgacgctgccgccgttggcgaacgctgcatgcagttcctccgccgtggtgacaactgtgatgtcgggtttgtagaaattcggatcgatctcgacggtgatatcgccttgcttggtcagcagattacccgataccatggtgcggtagttgcggcggatgggaatgctcttgaaatcgctgttggccgagatctctttacctgctgcatcgaggaacgtcatcttgaagtcggccagcgtagcctgttcgacaggcgcccagatgtagtccaccgtcagctcgccggtggcgttgagcacgtcggccgtgtattccacggcagcctcgccgctttcctcgcccgtcagtgcgttgaacgtgttcggaagagacgtgaaattcactttcaccttcgcgggtttcaggtcggccgcgttgtcgggaatcgccgcgaggtcgagcgtcttcacgttcagctggccgaagggacggcggagcgtgaacgtctccgagaaggactcggtaaccgtgtagtctttcttgcagaggaagaaggcgtcgaacttgtcgtcgttgccggtgtagtctgcatccgatcccagcgtgattgcgctcaggtcatcggtctcgtagccggcctccgagcagtcggcccagaatacgaagtcatacttctgctgagccaccagccgcaggttgaacgttgcggtgttgcccgttaccgttgcggtctgctgctccccgtagggctggccgttccggtagatctggagcaagcagcggtcgatctgcgagccgtcgccgaaatccgccgctgcggcacgggtctgtactccttgcggaatagagacggtaatcgtctgagaggtcgctcctgcggatggagagacctcgtccttctgacatgcggtcagggtcatcgcaaggcccgccgccaataggaataattttctcataactgattggtttttagagcccccccccgaagaagccccgaagaagccccgaagaagccccggagaagccccggagaagttgaaactcagtggtttgtaaaaaaatgttattaaaagaacttgcttcgtctttgcctttgtacccgcaggagcggtcaggctcctgcggattgaaagtgttattgagccaccacctcgtagttgtaggtgatgccgtctactgtctgtacattgtccttataaacgtatccgtcggctgcggcagtctggttatcctcgaaataaccgccctgaattgctaccgtaccatcggcgatatacacgtctttcatgcccgggtaaccggagaaatacccgcctgtaatcgtggtcttaccattttgattgtagagtgcgtaatatttgcagtcgttcagaatcgtaccgccggatatcgtcacgttggctcctccgattgactggatggcttcgatccgaccccccttgacagtcagcttggtaccaccgccagctgccatcagcgcataacccgtcggagagttccggttaatgacgttaccgttctcgatggtcatatcggcgctgccggtattcatcagcgtaaagccgggaccgtcgaacgttccgttcttgatgttgcagataccttggttataaatgacgacaccgttggcgtccgtagctttcgtagcggtgaaagttcctccttcgacagtcagtgtagctccctgttcgttcatgaaaatataatcgctggcagtcatctttccaatacctttgacggtaagctctttcttgttgacgatctgttgtttgccgacagtcagagtaacagctcttttaaagtcgatgacggtaggtttctcgattggaatctcgccactcgtttccggaattttcgtcaaatcataatgataccatacattgacgttaccaccgtctttcaagagggcaacgaagcgtttcaattcggtccagcgatccttaacaacgccatccacgatcaatttagccgtgcttatgtatccggcagtgaaattggaagcccgccagcccatatattcatcggtgaaatagccggttgctactccgtctgcctgtttatccaccttgttgttgcggagttccacggtgtacttgtcgtaagtgtcggcttttttcgacacatttaccatattgccgataaatgcgtgggagaaactttgctccatagcatagaacaaatcgccgtcgctataggaatccgcatcctgacctttgtaagtattgttgagagtaatgccgctgaccgagcagccctcaataagcacgttgcgctcgaaagtctggaaataaccgataaggccggcagcttgcgaacagtaggtgaacgtttcgggattaaatacgtcgatagagcaagcggttaccgagcagttgcggaccgtgacatctttcgagcttgtgctgacgaaaccgatcaggccgccgattttctgaacgctcttaatggccgtattcttcatatggcagttttccaccgtaccgtagtccatgcggccgaccaatgtaccgccgcgatagcaggtcacttcggcgccgtcgatcgtgaggtctttcacgttgccctgaagcacatagaagaaacctccgtagtaagtgcctttaccattaggttgacctgtggcgttgtcaacgtagaggttcttgatcgtatggccggcgccgtcgaattccacgaagcctttgccttccgtatcgatcggagtccaagggttatcggcagagcctttaaggtcgatatcggccgtcagcacgattcgggcacacttgccttgggcaatcagctcgatcgcttttttcagcgtagcgacatcgcctgtagcataagtcgtaacagtaccggctcctttcccgaatgtaatttccgtaaccgtaccgtagatctccacattgcctttcaccacgttcagttttcctacggtaacgccctcggggacaatcagggtgttgccggcagttgtggcttcgacagcggtatagctcgtgccgttcagcgtgacagtcgattccggaagattgatgataagtttattcgtagtgggcactgtaatattgacggcctcgggagcctggccgttctgttcggtggtgtaggcgagagtcacctgctggtcggtctcaggcagcgtaatggagatctccttggcagcctgctcggcagtcagggtgtgcggaatctcgatggtcgccgcagtcgttggagcggtcgttacggtaatatccgtagcgccgttttcgattgcctgagctacctcactgacgctttctacttccgcaatcactttatcaatgggactgtttgcatcgaaattcggatcgatcgtcacgctgatcgagcctttcttggtcagcaggttgcccgacacattggtgcggtagttgcgtcggatgggaatgttggtgaaagcgtcgttcgtgcagatcgccgttccgttattgaggaacgtcatcgtgaagtcggaaagcgcggcctcggattccgtggcccagaggaagtccatcgagatcgtaccgtcggccttggccaactcacctgccgtataggtcacgtcggccgatccgctcacttcgcccgtcagggcgttgaacgtcgtgggcagtcccttgaaagcgacactgtagcccgtgggcttcagcgcctcgtctttgatttcgttcaggtcgttggtctttaccaccagcagaccgaaaggacgcttcagggttaccggtttcgtgaaagaaccggtaactttgaaactctctttggcgaaaaacgcgtcgcgctcgtcgctgttgcccacgaacggcccgatttccgtgatcgacttcaaattcgccgtattgtagaccttgtccgtaaagttgccttcgctgccctcggcgcagtcggcccagaagacgaagtcgtaggtttgcgacgatacgagccgcaggttatcgaacgtaaccgtcttgccgctcacgcccttttcgatgcgatcgtacaacttgtcgccgtggtagatttccagaatacagcggttgaccgaggtgccggtgccgaaagcatcggtcacggcacgggtttgtactccgctctgcggaatcgttaccgtaaacgaggatgtcgttgctacgtcggaaacgagcccttcatccttctgacacgcggtaagggtcatcgcaaggcccaccgccaataggaataatttcttcataatatgttgaattttatgggttttcttgtctgtggtaatttatcattcgttatctgttattcgaatgtggccgttacgtgggtcgtgtagttctgctgcagttgcagcatgtcgagtcctttggtcacattgcccaccgtgatcgacaggccgatggattgccccgcatacggcacgaagaggaaatcttcgccgaccgagtttgacccggcagtcgttgccgggaacgcgagtgtcagagtttgcggagcggatgtcgtttctgtcaatacgtcgtattgtgtcggtacgttcgtgtatgtaaccgacacctcttgcccgcccgtgccgaatgcggccgtgttctgcatcgccaactttgccagcgggcgtttcaacgtggccgatacgccgttgccgccgttccactgtacaccgggtagggcgaaagcgaaagcgtcgcgcccactgccgggcgtatagggcgtccgggtaagcgacacttgccgcaggttgtcggtcgtataggttcccttgccgtaatcggcccagaagaggaagtcgtacgtgccgggcaccagtgcgatctcaatggctgcttcgtcaagcgttccgtttgctatcttatgtagtacgcatcggggcttggtgtcatttgtccaggcctcgaaggtataggtcaatgtttgttctgcagccgttgcgccgcgcgtcgccgccttggctgcaggctcgttcttcagcacgctttccgagtgcaggtagatcacaccgttcacgggcatagtcggggcgggcgtgggtttctcgtccttgctgcaaccggcaaagacggtcagtgcgaataataatatggtaactatctttttcatccggatgtcagtttagtcagggatcgtaatattgatgtcgccgtcgaaaccggggtctatgccgatgccgggggcgtagtcgcgcgtgaggaactcgtcgcgtatagtcgtcagtttgccccgcacgatgggcacgtcgatgccctcgatgcggttcagcaggttgccttcgctgtcgcggatcgtaagatcgaccttcacggccgactccgaaccattgacgaagatgtaatcgctggccaagtgggcctccttgttcgtcagaggcgtcatgttacactcgaaccacatccccgtgcgggcgtcgttgggcttgttcgtgtaggcgttgaaacccgatgggaagtacccggcgtagtccacctgtacccgtatcgtcgaaaggtctggcgtttgggacagcagatcgtcggccacggatccggttatctccgagtgtcgtgcggccaactcatcaagaaacttgtcgatgtcggtagcgatgaactcgatcttggccatcgggcgctggagcgttacagtcacatctacagtttcgttccagcggtcgcgatgggccttgaggtcgatctcctgccgggcaacgtaggtatccttatggtcctcgtcaccgatgtagtttccggcagcgggcacgctgattgacgagagcgaaggaatcgtatagtatttgtcgtccacggaaccgttatccacgtagtccatccacgctacgacgtggtagcgggcagcgtgtagcgccagcgaggtgtggatcgtgtggtgtccgtccgccgccggctcgcagccgagcacacgccgttccgcgagttcgccgccgatctcgtcgcggaatacctcgacgatccagcgaacgtcatacgcgtcaataacctccccttcggagcgtcctgtctgctcgtaaggttctattttcgggtctatcgcaagagacagattcgcattgaccagcgtgggatcgacgccttcgttttccggaaattccagtacggtcttgtcacagcccgtcaatacgagaacgagtaaatgggcaatatatattgttattcttttcatcttccgctcctcccttattttccgaaccgatacaacagattgatgcccaccttcgtcaggccccagtagttgtaagcccgtcccttttcgaagcgggcgccgtttggtatattataataagtatcgtatttcgtatggacgtatcccgcgccgacggtgaactccgctgcccaatggcgggcgaagggcagcacgtaaccgtagctcaaccccacgccgtagaagccgtcgggcgactggtagcgatttttgttgtccacagcgatattgaaagcgccgatgttgagatgcactccgaagaaatgacccttcatcggggctttcagccagtagcggaattcgggctgaacagccagaaaacgcaggcggtagtcgcgtgccacggtgtaggggctgtagatgatcggcagatcgatcgagtagtggtcgccgaaactgtactccacgccgaggttggcgaccgtagcggccaaatatgccacattggttttaatggcccagcgataaagaggacgtacggggtcgaacatcattccctccaatgcctcaacgaccgactgtgtcgattctgattccggctctgcggatatttccgcaggtatttcggagacagggttacatgcagactcaataactggcttttccgatgtcggttcggcttcgctcccggataatgaatcaaccggcataacatcgctctccggttcaggcatctgattacttcccgcactacggaacacataggccacggctatcacatccgtcattcctcgccaccgttgcgtagaattcgtcgtccgaaaatgctcctctttcaatccctcatgaacgataaaataagacttgacctgattgcttcgatttttcgcagctgcaaggtttgtcttgaaagaatcgtaagaggagcaaaaacccagcatacgcactttcatatctcctgattcgattgaaagcttgtgttgtcggatagattgagtcagtgagttgatagcggctgcatttcctttataatccgcccaaaacatccgtcgtttcggggcaaatcggaagacaaccgtatcctgcttctccgatgcgagcacactcgtcttctgccgagtactcttgctggctttggcggatagaacactgtctggctcttgagccgcagcattcagcccgtacagcaggaagccgagtaaaaaaagcctcgggaacaatctcgaacgaccttttcgatctgaaatacttttgtcaaaacaaatcatactaaacaattaaatagacaaagattttattcctcatctgcttataaagatacagaaaatttctggaatagcggcatgaaaggcatgaaaatgcgctgaatggcttagtataaaagcgtttatgaagccaaccggtgccaaaggaaaaaatgaggtaacgcaaaggaaagcggaatattgaagaagaacggttgccaaatcattacctgttaaaaaaaaagcatattcttataaactgcttattttcagcgtgtaggataaatgatgatgcctggcgcaatggtaggagatttgcttctctattccgcattccgccattacctttttcagttgtttgcacatcgtccaatagttgattttgacatgcaagtacggtttgggggcaggtacgggaaaacctactgccgaaaggcagtaaggcgttctgtaccgagcctacgcgaggcgaccggtggcgacctggtggaactggcaaaatacatttgccggacggactgcgtgagcgaggccctggcgtatatagagaggcttgtgaatggcgcatcactaccgagaacccgtatgctgaccgctccaccccgaccggtggaggctgaaatgaaagacgtgatcgtgattccactccgtcatcacgccctgttctcttacctccaatcccggcttatcgacgcggacatcagccgtatgtattgcaaggaggtgcattacgaactgcgaggccgtcattacttcgctctcgcattcggcaatatatcaggcggttacgaggtgcgaaacgcctattacaagggatgcctgaataacaaggacatctcattgataagacatctgacagaagagacacaggaaaacgtctgtgtcttcgagggattcatggattttctttcttatatgacactgaaactggcaggcgaccggacggtctgtcttgccataccatgcgactacctcgtgatgaactcggtaaacaatttgaaaaagacgctggcacgtttacaggagtattcggacattcactgttatctcgacaatgaccttgccgggcagagaaccacagagaccattgccgggatgtatggcggacgtgtcagcgatgaatcttgccactatgcggaatacaaagacctgaacgactacctgcgcggaaagaaacgctgatattcaatgttctcttttgccacctaaagctctccaccacgagagctttttttatgccccgatttctccatttcccaccatagagactgcaatatagtacgatttaatagttcgatttttgaaacttacacaaatctcattaacgaaacagatgtttaatgctcaattattttatggttttatatttcgtgcgtttctttgcaaaatcatactaatacgaatttttaatattcatactaaatacatgaactcatatttcatttttgccattgtcctgacggttgcctacatcatttactacgccgtcatcatagcgcatgacctctacgggaaaaaggggacggacaaaccggacgaggaagttttcgacctcggcgcaccggaagaggaagagagtgtggctgtcacggaaagcgagagcggcttcagtatcggtagcgagaactacgagacggaaagtacggctacctcttccgaaacatcccctgaggaggacatcaaggacaaaccgggaacggcgcaggagaaactggaacggctgaaggccgaggcggaggaacagatggaagagaccacgccttacctgtcggacgcacgcacgtcggaggagatgtacaaggctatgatttccaagggacggttagacaaccgaccggaaataaagtggaacccaattcaagaccggttgtgagatgtcgaaagctaaaaagattctatgtgcgctgtgcctcccgttcccctacacggcttttgccaaaagcggcagcgtgaactatagctggggagcggacgcgttggccacgatgcacgacttcgtggtgacgatgatgctctatgtccagtatatctgttgcaccatagccggggtttacgtcatcgtgtccgtttgtcagatatacatcaagatgaacacgggcgaggacggcatcaccaagtcgataatgacgcttgtcggcgcgtgcctgttcctgatcggggcattctatgttttcccggctttcttcggctaccgcatataaccttacttgtatcaggtcgcagacaaataaaatattcactaaaaaagtaaacgtatgtttcagaaaaccaaacagctgtgccgcaaggcattcggattcgtcaacggaatccctaccaaagtaatgatgttctccttcatgctgctgtccggcatggtggcgaaagcgcagaactccgcaggcgactattccgccggtacgagcgcattatccactgtcgccgatgagattgccaagtatgtgcctattatggtgaaattgtgctacgccattgccggcgttgtggccatcgtgggtgcaatctcggtatatatcgccatgaacaacgaggagcaggacgtgaagaagaagattatgatggtcgtgggagcatgtatcttcctcattgcggcggccaaggcgttgcctctgttcttcggtattgccgcttaaacatcaaggataagtatgaaaagcaaggacgaacgctatccggactatccgctgttcaagggactgcaacggcctcttgagtttttgggcatccaaggccggtacatatattgggcggcggtgacgacgtgcggagccattgtcggctttgtcgccgcctactgcctgctcggtttcattgccgggcttgtcgtgctggctaccgtcgtatcggtcggtatcgtgctcatccttctcaaacagcggaaaggactgcatagcaagaaggtcgctccgggtgtgtatgtgtatgcccactcgcgcaagatctgacgaaagaaaaaccatcacggcaatgtgcatggctttattgattgttgaacgcgggcgggtttgtcttgaagcaaggcgaacctgcccctatttaattacacgtatatcgaaatgaccctatacatcattttatgttttgtcgctttgtgcgcgggtatggccttgtcggtctatgcgttcggtacgggcggcaagcgcaagcgaatctttcaggacatctatttctcagcggaggaaacggacggtgtgggtgtgctgtacaccaagaccggcgaatattccgccgtacttaagatagagaatccggtacagaaatattcggcggacatagatagctactacgacttcacgcacctgttcaccgcccttgcgcagaccttaggcgaagggtacgccatccacaagcaggatatcttcgtcaggaaacagtttgcaagcgaaccggctgacgggcaggagttcctgtcggcgtcgtatttccgctacttcaaagggcgtccctacacggacagcctttgctacctgaccatcacgcaggaggcgaaaaagagccgcctgttctcgttcgacaacaagaagtggcgcgatttcctcgtgaaaatccgcaaggtgcatgaccaactgcatgacagcggcgtacaggccaggttcctgaacaaagccgaggcgagcgagtatgtcgaccgctacttcgccatgaacttcaaagaccgcaccgtgtcgatgacgaacttcaaggcggacgatgaaacggtgtcgatgggcgacaaacgctgcaaggtgtacagccttgtggacgtggactgtgccgcactgccctcgatgatacgtccgtacacgaacatcgaggtgaacaacacggaaatgccggtcgatctggcttcggtggtggacaacataccggacgccgagacggtggtctataaccaagtcatcttcctacccaaccaaaaacgggaactggcgatgctcgacaaaaagaagaaccgccacgcgagtattccgaacccgaacaaccagatggcggtcgaggacatcaagcgtgtgcaggaggtcattgcccgtgaaagcaagcaactggtatatacgcacttcaacatggtggtagccgtatctgccggtgcagacctgcaaaagtgtacgaaccacttggaaaacgcattcgggcgcatgggcatccatatcagcaagcgggcgtacaaccaactggaactgttcgtcggttcgtttccgggcaactgctacacgctcaatgaggaatacgaccgtttcctgaccctttccgatgcggcgatgtgcctgatgtacaaggagcgcgtgctgcacagcgaggaaacaccgctgaagatttactacaccgaccgtcagggtgtgccggtggctattgacatcacgggaaaagagggaaagaacaagctgacggacaactcgaatttcttttgtctggggccttctgggagtggcaagagctttcatatcaactcggtcgtgcgccagctccatgagcagggaacggatgtggtcatggtcgatacgggaaactcatacgagggactgtgcgagtatctgggcggcaagtatatcagctataccgaagaacggcctatcacgatgaatccgtttcgcatcaaccgggaggaatacaacatcgagaagatagacttcctcaagaaccttatcctgatgatttggaaagggtcggacagccaaatccccgaaattgagttccgcattgtcgagcagataatcatagactactatgatgcctatttcaacggatttacaagatacaccgacgagcaacgggaggtactgctgaaaaacctgtttgcggcggccagccgaaagaacccaaacaaaccacccagagaggtggatgagatggtgcgcaaacagatagaggtgcttgaggcacggcgggcggccctcaaagtgacggagctgagtttcaactcattctttgactactcattcgaccgtctggagcagatctgcaccgaaaacgacatcacgacaatcagctactcgacctattcgaccatgctgcagccgttctacaagggcggtgcgtatgagaaaattctcaacgagacagtggattcggcactgtttgacgagacattcattgtctttgaagtggatgcaatcaaggaaaataagaaactgtttcccattgtcacactgattatcatggacgtgttcctgcagaaaatgcgcatcaagaagaaccgtaaagtccttgtcatcgaggaagcgtggaaggccattgccagcccgctcatggcggaatacatcaagttcatgtacaagaccgcccgtaaattttgggcttctgttggcgtggtgacgcaggagatacaggacatcatcggcagcgaaatcgtgaaggaggccatcatcaacaactcggacgtggtgatgctgctggatcaaagcaagttcaaggaacgctttgacgaaatccgaaagattcttggtctgaccgaggtggattgcaagaagatatttaccatcaaccgcttggagaacaaggatgggcgcagcttcttccgcgaagtgttcatccgccgggggacgaccagcggcgtgtatggcgtggaagagccgcacgagtgctacatgacctacacgaccgaacgggcggaaaaggaggcactgaagctttacaagaaggaacttcggtgcagccaccaggaagctatcgaggcatattgccgggactgggatgccagcggtatcgggaagtccctgccttttgcacaaaaagtaaacgagacggggcgtgtgctcaacctccgtcccgtgtatgaatccaaataagcattgcagccatgaaacgactactccttatcctgaccatcgcctcggtcgcactctgccagacggttcacgcccagtattacagcgtgaactacgacacccgtaccgttgcggcgatggtggccgccttcggtacggaagcggtcgccgaagggtactaccgggagcaggtcgatgacatcctcaagcactacacggcagcggaggtcgctaccgccgggatattcgcggccaagttcttggagcataaagccctgagcgacctcggcatctggaacagccgcacggagaactactactaccggcgcatctaccggatggtggcggagaaaatcatgcccaagatatgggtggtggcgaagcagatgctccattcgccgcaaacggctatctattggggcagttacctgatgaaagtctgcgacgataccaaaagtctgtgtatgcagttcgagagcgtggtgaccaacagcacgctgaccttttcggacatcgcctttctcgaaatcaatccggagattgcccccttgctaaagctctccgaaacgggaaacatcgactggcagcggatgatggacaacttcgcccacataccgggcaacttcacgcacgagaacctgaaaagcgacctcgacaacctttataacacgggtgtcggccttgcaacggcaggcattgccaatctcggtgacgccctgttgcaaagcagctcgttccatgacctgatgggcggaaaggttgaagaaatcggcaacctgtatgaacactacgggagtctattcgagcaggcggaacatgacatcggcggcttgctgattgacatggtgggtggtccggacaacgtggccggtctgttcaacttcagcaactacaacctcacggcatggatgaccgactacctggacgaagcgatggggaactattacacgcagcggtggtacattgcccggcgtgaccaagggagcgtatcgctgtgcgactactatcctccgacggacgacaacagcatcctgaacgggggcgcatgggtgcggttcaacacgagcgacccgaatttctatcccaacgcctcgcaacgggaacaggtacttgccaactcggaaggatatgccggttggtcaagaaaccgcgtgcagcagttgaacaaccagaacgacgggttcagctacagcatcaactattggatgagtgcctatatcatcagcaagaaaaacaagcagaccaaaaaggcatacgcatacgaaatccatgtgagcaaaagctggaataaggaagaagttgtctatgaggaagtcttcgattcctactcgatggacttgaatacgtttcgggcgcaactgaatgtccgacttgcggagttcaacgaaaacgaggacggctacacctattatatatcttccggtacgcggaactattaccaagcaacggacgccgccaaattgaagggatgcgagagcgtgaccatcagcgtgacctgttccgacggggttacgctcggacagggctcgacacaatacaagtgccgtaaatgcggcagctcgttgaatgcccacaccaaggagtgcgccatgcagacctcggtgacggaaaacaacctcgacctttcggaactggatgcgctgttgaacgaggcaaacagccaagcggccaatcttgaagcgcaaatcgggacattggaaaacgagaacgctgtcctgctgaagaaaatcagtacggcgagcattgaggatgcggcggcttaccgacagcagtataatgcaaacaagacacggatagaccgtctgaaaggcgaactcgcggagtggaagaagaaacagtccgactatgctcaggcgaagtcggaagccgcagacgacaacagcgtagcgacggatgactattaccgcattccagctatcatgcaagactgcaaggctgcctacggcctgacatggcaggacggcggatcgtggaacggctattcgtatgtgcgcaaggcgacaatgccgaacatcaacggcatcatcacattcaaggctacggtctcgattgcccgcaagccgaaatattttctcggcatcaagattcaccgtgccatcatccaaatccaatgggaactgacctcggtctatacggacacgcacgtcgccgatgtgctgacactcgatccggggctttcggatgcggagaaaaccaaattagtgaacgaccgcatcgccgaaatcgcccgtgaacacccgtcctgcaaaatcacgacggaatacgcccgcagcacaccgctggaggaaactccgtccggcgacgtgtaccatctgctgtggtcgagcgaccgcctcgaaatcgcgagggaggtggacagcagaatcacaaggatatacgccgacttggtatcgctggaaaagatgatgcactacaagcggagcatccttgacgtgatgaaggatgtgttgcccggactggacacggacgaaggccgcaggctgacgctcgtggaggaatgccatgaccgctgggtggagagcgcacggacgtttcggaacgatggcggcagaaacggcggaaaggaggtgcggccatgaaacgcattttacggatagccgcattgctgctcttcctgctgcccggtatcgccaaggcgcagtggactttcgatatagtctccgtcgaagcctacatcaacgaccacaagaagcagcgcagcctgttgttggcccgcagtaccttggagtacagcaacaaactgttgcacgaatacagctgtaaggaagtcgggggctataaagagctgaatatcgaccttgaccggtacacccgtgcgttcgatgtcatcgacgtcatgtaccagtcgttgcgcacggtgctgaacgtcaagaatacctacacatcggtcagcgaccgtatcggcgactataaatcattgttggaggatttcaatgcgaagatattgaaacggggacgcatcgaatccgcagataccctgattatctccatcaatgcgagggggctgagggcgattgcccgtgagggggaacagctctacaagtccgtgagcgacctcgtgctgtatgccaccggagcggcagcctgctcgacctccgacctgctgatggtgttggaggccatcaaccgctcattggacaacatcgagcggcatctgaaccgtgcgtatttcgagacatggcggtatatacaggtgcgtatcggctattggaaggcaaaggtatatcgctcccgcaccatgcgggagattctcgatgacgccttcgggcgttggcgcggagccggaagactggattattaacgacaaaaagagaagaatatgaacagaaaactattactcatggcggtggcggtcaccgtaacgacagccgtacacgcacagtatgtaacgtacaaccatgattcgccgaagcagaatcaggtaacggtcatggagaccggtacgggcgcactctcgcccgacctctattattccgtgctgcacaacaaatacaagaagtcggcagcggccaaaaacaagctctcgttccgcacgcttgccggtatcaatctctacaaccaggtggacgaagcggaagccattgattcggccttggtcaagcgggcgaaggtcgaggcgttgaacgttgccgaccggcaggtggacatcgcatggcttgccgagggcgataaggtcagcggacagatggagcggttccggcgcaacatcgaccgtattctcctgtccggtggcactccggccgacaaggaacggtggacggaatactaccacgtctatcagtgtgccatcaaagccacgaaagacgcctatatgcccaatgcccagcgaaagaaggagtatctgcgcatttacgaggatgtggcacggcagaacgagattttagtgggctaccttgccaagcgtcagaacgcaacggtgacgaatgcactgctgaacgcaacggacaaccgtaccctgcataaaggcggtattgtccgcaatgccatgagccggtggcaggaatcacgccttgcggtgcgtggttcgcaatcgggcagcaacggaaacggcgaagatgacaacgagagtgtaaacagagggaaataaaaagacagggctatggcaaacggagatatactttcggatttcggcatcaacctgttggaggaggaaatagatgatgtcatctttcagaccaacgagtttctgactgacgcgacttttaccggtgcgcagggacctttttggtggatattgcagatgtgcatggcactcgcggcactgttctccatcgtcatggcggcaggtatcgcctacaagatgatggtaaagcacgagccgttggacgtgatgaagctgtttaggccgcttgccgtgtcgattatcatctgctggtggtatccgcctgcggacacgggtatggcggggagccggaacaactggtgttttctcgatttcctgtcctacatccctaactgcataggttcgtacacccatgacctgtatgaagccgaagcttcacagatatcggacaggttcgaggaagttcagcagctcatccatgtgcgtgacacgatgtacacgaacctgcaggcacaggcggatgtcgcccacacaggcacatccgatcccaatctgatagaggcgacaatggagcagaccggtgtggacgaagtgacgaacatggaaaaggatgcggcgaagttgtggttcacgtctttgacggcaggtgtcatcgtggggatagacaaaattatcatgctgattgccctcgtggtgttccgaatcggttggtgggctacgatttactgccaacaaatcctgttgggaatgctgacgattttcgggccgatacagtgggcgttcagcatcctgccaaaatgggaaggtgcttgggcgaagtggctgacacgctatctgacggtgcatttctacggggcgatgctctacttcgtgggcttctacgtgctgctgctctttgacattgtattgtgcatccaaatcgagaacctgacggcgataaccgccagcgagcagacgatggccgcctacctgcagaactcgttcttctcggcgggctacctgatggcggcttcgattgtagctctcaagtgcctgaaccttgttccggacttggcggcatggatgataccggagggcgacacggcattctctacccgaaacttcggcgagggcgtggcacagcaggcgaagatgacggcaaccggagggttgggcggcatcatgagataatccgcaaaagataatataaacccaataaaaatcataacaacatgaaattgcaagagaaaatcaaaagctggtgcaaggatgagaaatttatgtcctttgcacaggaacgagcgagaaaagaggtttgcgaggtggcggagaaccaccgcatcgacccgcagtatgaagaactggacgaagccttcgagtacgacgaccggtacatcgcccccttagtgacgtacctaacgtacaagctgcgtcttgccctgctgcagcggaacgctggtaagcgcaaaagaggaatctggtgggtgcttgtccatgtggagatgcagggctattacgtggagatattctcggcggagttcgagaatcttttgacggaacttcgggatgcggtcatacccatgctgcacacggaatatgtacagatgttgaacggtaaaagggaataaccgatggtcatcaagaatttggaaaacaaaatcagactggtgggcatcatctgtaccgcttttctcgtgggatgtgtcatcatcagcttgtcaagcatctggacagcccggacgatggtctcggatgcgcagaagaaggtgtatgtgctggacggcaacgtgcctatcctcgtgaatcgcacgacaatggacgaaacgcttgatgtggaagccaaaagccatgtggagatgtttcatcattattttttcacgttaccgccggatgacaaatatatccgctatacgatggaaaaagcgatgtatttagtcgatgagacggggttggcacaatacaacacgctcaaggaaaagggtttctactccaacattttgggtacgagttcggtgttctccatctattgcgacagcgtggctttcaacaaggagaagatggagttcacctactacggacggcagcgcatcgagcgacggagcaatatcctgatgcgtgaactggtgacggcaggacagctcaagcgtgtaccccgaacagagaacaatccgcatgggctgcttatcgtgaactggcgtaccctgctgaacaaggacatcgaacagaaaacgaagatcaactactaaacaacggagtttatgaatatcaagggattcaggcggatgctcttcggtgaaaagatgccggacaagaacgatccgaaatacaaagaccgttacgagcgggaggtgtccgccggacgaaagttcgcccaagcgacacgtatcgacaaggctgccgccaaggtacagggattcgccaacgcgcaccggatactttttctggtcatcgtcttcggtttcgctatcggagggttcacttggaacatctatcgcattacgatggcataccgcaacagccggccgacacgcacggcgacggaaatgcaggattcggtgctgcgggaaagacacaagaggctgcaagggggtgaaataagggaaaatcggaacgagaacaagaaatatgaaccgcaataaaggagtgcttatgaatacacgatttgaaaaatcagtccgctcgtcggacgaatggtacaccccgaaggaggtgctgaaagcgttaggcaggttcgaccttgacccttgcgcccctgtccatccgttgtggccgaccgccgaggtcatgtatgaccgggacatggacggattgtccctgaaatgggaagggcgtgtatggctcaatcctccgtactcgcgtccccttatcgaacagtttgtccgaaagttggcggaacacggcaacggcatcgcgctgttgttcaaccgttgcgattccaaaatgtttcaggacgtcattttcgagaaagcgacgggcatgaaattcctgcgccaccgcatccggttttaccgcccggacggaacacgcggcgattctcccggttgcggcagcatcctgatcgcattcggagtggaaaacgcagaagtgctgaaaaactgcagcattgaaggcaagtatgtacaactcaattaaaagatgtatgatgaagatatttgataaaatcaatttcagggagccgaagtatatgcttccggctgtcctgtatatcccgcttctggttgcatcgtacttcatcttcgacctgtttcagaccgaaacggcggagattccggacaagacgctgcagacaacggagtttttgaaccccgatttgccggatgcccggcttaaaggcggtgacggcataggcagcaagtacgagaacatggccaaatcatggggtaagatacaggattactccgcagtggataacatagaacgagatgaacccgatgacaacaaggaagaatatgaatcgcaatacacggtggacgacatcgcccagctcgatgagcaacagcaggaaaaggctgcggcagcgcaaattgccgatgccaagacgcgcgagcaagaagctctcgcggaactggagaaagcccttgccgaagcaaggttgagaggacgcaatgaggtattaccggcgaccgatacggacagtaccgcatcggcgcaacccccgacggcaaccatagaggttaagggaaaaatagaggaagagagccgttcggtaaaagccccgtcagagaacgaaccgcccagcgaagtggtacgcaaggtaaagacggcttcggattacttcaatacgcttgcggtcaatgcccgtgaaccgaaactgataaaggccattatcgacgaggacatcaaagcggtggacggctcgcgtgtgcggttgcgtctgctcgacgacgtggagatcaacgagtgcgtggtcaaacgagggtcgtatctgtatgccaccatgagcggcttctcgtcggggcgtgtgaaggggaacatcaccagcattctcatcgaggacgaactggtgaaggtcagcctgtccctttacgacacggacggcatggaggggctttatgtaccgaacagccagttccgggaaacgagcaaggatgtggcaagcggtgcggtgtcggggaatctgaacatgaataccggcagttacggcaacagtctctcgcaatggggaatgcaagccgctacgaatgcctaccagaaaacgagcaatgccatcggcaaagctatcaaaaaaaataaggtaaagctgaaatacggcactttcgtctatctggtgaacggacgtgagaaacagtaaaaacggaagccatgatagagattgacaacatatataatatggactgtatcgagggcatgaagctcatggcgaacggcagtgtcgatgccgtgatagcggatttgccttacggcgtgttgaaccgtagcaacaaggcggtacactgggacaggcagataccgctcgaagcgttgtgggaacagtaccgcaggatcaccaagccgggaagccccgttatcctctttgcgcagggcatcttctcggcgcggctcatgctctcgcaaccccggatgtggcggtataacctcgtgtggcggaaagaccgggtaacgggtcacctgaatgccaaccggatgccgctacgccagcatgaggacatcatcgtgttctacgaccgtcagccggtatatcatcctcagatgatgccgtgtccaccggaacggaaaaatcatggacggcgcaagacggacggtttcacgaaccgctgttacggtgaaatgaaactggctccggtgcgtgttgccgaagacaagtacccgacctctgtcatttccatacccaaggaacacaagacaggagcattctatcatccgacacagaagccggtagccttgatagagtacctgatgcgcacctataccaacgagggcgatgtggtgctggacaactgcatcggttcgggtacgaccgccattgccgccatccgcacgggacggcattacatcggattcgagattgaaccgacgtattgcgaaattgccggacgacggattcgggaggaactggaacgtggtcatgggattaaagaaagcgaaataagggaaataaagaaataaaaaaataaaaaatatcaacagaaacgatatgaacaagaaaataattataactgcatttcttctggcggcaggactttttgccacacggaacgcacaggctcagcgtacatacgaagagatggaacggctgactgtcaatgaacaggtaacgaccgtcatcacagcctcggaaccggtccgcttcgtggatatttccacagacaaggtggcgggcgaccaacccattgagaacatcatccggttaaagcccaaagagacgggacacgaggacggtgaagtgctggccatcgtcaccatcgtaacggaacgctatcgcacgcagtatgcactcatctacaccacgcggataagcgaggcggtggcagacaaggaaattcagctacaggaacgggatgcctacaacaatcctacggtctcgatgtccacagccgacatggtgcgttttgcaagacgggtgtggaactcgcccgcgaaaatccgcaacgtggcgaccaaggcgcaccgaatggtgatgcgcctgaacaatatttactcggtgggcgactacttcttcatcgacttttccatcgagaacaaaacgaacatccgtttcgacatcgacgagatacgggtgaaactgtcggacaagaaactttcgaaggcaactaacgcgcagaccatcgagctgactcctgccctggtattggaacacggcaagacgttcaagcacggctaccggaacgtgattgtcgtgaaaaagatgacctttccgaacgacaagctgctgactatcgaaatgacggaacaacaaatcagcgggcgcaatatcagcctgaacatcgactacgaggatgtgctgtcggccgattcatttaacaccgctttattggaggaggaatgacgatgaaaaagacgttgaaaacagttttgttactgatgcttgtctgcatagggtttgccaccaatgcccatgcgcaacgcaacggcggccgcctctcgctcggcgtgggattgctgtatgagaacggcatggacgtaacgcttgcttacgagcatgaaatgaactaccgtcatgcgtgggagttcttcgccaacggctatctgaaatggacggaatgtaaatcttgcggtcatatttgtccggaatccttctggcgcaactaccgcacttatggtttcggtgtggcgtacaaaccttgtgtggtgcgtggacgcaaccattacggcaacttgcgtatcggagcttcggcagggagcgacacgaacaagtttcttgccggaatccatgtgggttacgagcacaattatgagctgcggtcgggatggacgctgtactggcaggtcaagagtgacatgatgataaaaggggcggatttgctgcggacaggtatcgtgctgggtgtaaaactgccgataaaataaaggaaaaacaaaaaaacggaaatgacatgatacgaaagattcaatggattgcaatggtagtggcggcggtattgtgcgctgcctgtgacgcccatatcgacgtacccgatacggcggtacgtccggggcatattctctgcgaggacggcacggcattgtcctatgcgcagtatgaacaatcggggaagcgggcaatagcggttgtctttgataccgaacgccgtgaaggaacggaagggaacggctatgcggtttacctgtgggacattgctccggcggcattcgccgacagcctcggtgtcgcacaagggacgtcggccgacatcggggcattggacgggaacatgaacacctttgcgctgtacgacacaagggagacggcttcgcctatggcggaagcggtctttgacctgtggcggtacggacagagtgcctatatcccgtcggtagcacagatgcggttgctgtatgctgtccgggaaaccgtcaatcctgtcattgaacggtgcggcggtcatccgttgccgttggatgaatacgattgctggtactggacatcgacggaagtgtccggacaagagacggcgaaagcgtggctttactcgacaggaagcggcgcgatgcaggagacacctaagacacaggcgcataagctgcggcctataattaccatgaacaaataaaatgtgcaacgatatgaatatagatatgcttttctgtatagtattgatggtattgggggctttcctcatatactatcccatcaaagatgaatcacctcggcaaaaactgaaaaagctcgccgattctgttgcgtctgataaaaaggacattgattatctgattcaacgcttcagctaccttttggataacatggcggcagacaatgggaaaggttcggctctgagatgccagattgccaaattggaggaagttgtcaaggagttgaacggcaaacgcaaggaacttgagttaaacaaccggtcgatgacggatgttaatgacgaattgaagcgaagcaatgccgaacttttaaggaaggcttctgaattgcgtgatgagatacagcaacaggaaattaaaatccaacagcaggaagaatacatcaattctgtccagagagtcaaagaagggcttgagatagccttggacaacattcaggcagaagaggtgcattatctctcacagccgatattcagcatgaaaatgacgcctatagtcagaagcaaactcgaatctcatgggatattgtatgtcggcgacctgattcagctcaacgaggaatatctcatggaaatctggggtttaggaccggtagcacttgaaagaataaagacgaaactgaacgaaaacggtgtgtggttcggtatggatgtcatacgaatcaacgaccgttggtatcgtcggaaacaagaattaacaacggattgattcatggaagagagcaaagaattacaagggttctacaagatattccgtgcggtcatctatatctccgtgctgatggagttcttcgagtatgccatcgaccctgccatgctcgaccactggggtggcatactgattgatattcacgggcgcatcaagcagtggatgatttacaatgacggtaatcttgtgtacagcaagattgcgacgttcctgcttatctgcatcacctgtatcggtacgaggaacaagaagcatctggagttcgatgcccggagacaggtgttatatccgctaatcagcggactgttcctgattgtgttctccgtgtggttgtaccatcatccgatggaaacgaggctctacacgttgccactaaatatcatcttctacatggcgaccacgcttgtcggtgtgatattggtacatatcgcactggataacatctcgaagttcatcaaggagggactgggtaaagaccggttcaactttgagaatgaaagtttcgagcagagcgaagagaaggttgagaaccagtatagcgtgaatataccgatgcggtactattacaaaggtaaatttcgcaagggatgggtgtcgataagcaactgtttcagaggaacatgggtagtcggaactccgggcagcggtaagacgttcagcatcatagaaccgttcatccgccaacatagtgccaagggctttgcgatggtggtctatgactacaaatttccgacacttgccactaaactttactatcattacaagaaaaaccagaagctcggaaaactgcccaaagggtgcaagttcaacatcatcaacttcgtggatgtggagtacagcaaacgggtgaaccccattcaggcaaagtacatcaataatcttgcggcggcgagcgaaacggcggaaaccctgttggaatccctgcagaaaggcaagaaagagggaggcggaggcagtgaccagttctttcagacttctgccgtgaactttcttgccgcctgtatctactttttcgtgaactacgagcgggaaccctacgatgcaaacggaaagaaactatatgcggagaaacggcaagatccgcagacgaagttctggaagccgacgggtgtcgttcgtgaccgtgagggtggcagcatcgtggaacctgcctattggctgggaaaatactcggatatgccgcatatcctttcatttctcaatgagagctaccagactatttttgaggtactggagacggacaacgaggtcgcgccgttgctcggcccgttccagacggccttcaagaacaaggcaatggaacaattagagggtatgattggtacgctgcgtgtctataccagccgtttggccaccaaggaatcctactggatattccacaaggatggggacgacttcgacctgaaagttagtgaccccaagtcacccagttatctgctgatagccaacgatccggaaatggaaagtatcatcggagcgttgaacgctctgatattgaaccgtctcgttacccgtgtgaacaccgggcaggggaagaatattccggtcagcatcatcgtggatgagctgccgacactgtatttccacaagatagaccgactgataggtacggcgagaagcaacaaggtaagcgtaacgctgggttttcaggagttgccgcagttggaggctgactacggaaaagtgggaatgcaaaaaatcatcacgacagtgggcaacgtggtaagcggttcagctcgcgcaaaagagacactggaatggttgtcgaatgacattttcggcaaggtagtacaggtcaaaaagggcgtgaccatcgaccgggataagacgagcatcaatctcaatgagaatatggacagccttgtacccgcctcgaaaatttcggatatggcgacgggatggatttgcggacagacggccagggatttcgtgaagacgaaaaccggtacaggaggctcgatgaacattcaggaatcggaagagttcaagactacaaagttcttctgcaagacggatttcgatatgaaggagataaaagcggaggaagcggcctatgtaccgctaccgaagttctacacctttaagtcgagggaggaacgggaacgcatcttgtataaaaatttcatacaagtcggacaggatgtaaaagacatgataacggatgtactgaacaagcgtggggcgaaataaatcaaaatccctgcaataatcacgaaattattgcagggatttttatattcaatttcagttacccaaaatcttgtgggcataaagccggttttacggacgtaaatgaattatctgacagtttccgatttggaatcgttttccgatagcagattttgtaatttgtcgatgtccggtagagtcttgcgcagattctccggcatttcttgggctgtgcggtatgtcgccacgcccataggcttatcatagtcgcgcaccatgatttcgacaaacttgcggttggcatcctggcataggacaataccgattgaagggttctcgtgcggtttcttgtcggtcatgtcatacaccgtcaggtagccgctaagctgtccgagataattcgggcggaacttgccccgtttcaactccacgattacgctggcattcagttctctgttgaagaatacaaggtcagcaaacatttcttctccggcaactatcaggcgatgctgactgtcgataaaagtgaagtcgtttccaaaacggagaatgaactgcttgatattggttacgatttggttttcgatgaccttttcgttccagtcctgttcgcgttctcccacattctccagattaaccatttcgagcatatactcatccttgaacgccaatatcgcttttacggcataaatggcttcgggcagcacttgaaggaagttgctcggcaaagatccgcgatttgaatagatgtcttctttcaagtaatttttgagagaggatagcgaccacgcattttgagcggcacaatggatatagaacaaccgttccgcgatgtcttttgaacgagtcaggatttcaatatgatgtgaaaagctgatcttgacaaaatcgtcccaggtaaattcggtattgaccggttgcccgataagttgcagcagtagatgctcgtcaatatccaattcgcccaacgctgttggatgaattaaagccgtacccttttccgacgaatggttttccaattcgcccaacactgttggacgaattaaaaacgtcctccattcctcatagaatgagcgcatccgtttcaaccccgattcagaaaagccgtgcagaccgggcaactcccgttgaaggagctttgatatggtaggcaatgctttagtaccccaacagccgatgcgggaattttcagacacgaatttccccactccaaaatacaacgagagagtttctttgttgaccgcagccgcacttctataccggcagcgttcgatggcatgtttgattatctctactgcctctgcatattgtgtataatccgatgggataacctgttgttccatatacatacgtttttgtgccgcaaaggtacgaaaaatacgggatatacagggcagaatgccaacatattatagtgccgcgtgggtcttattcggtatttttagcgttccggtgtcttgcactcgctttgctgccaatctactcactcagatgttcatgcgtctggggcgtgccgagaaagctggtagcggtgtggataagattgtgagcggttggcagtctttgggttggccgcttcctactgtagccgaggaaacacgtccggactatgttgtgctgaccttgcagttagggatgaaaacccgacaagaaaacccgcaagaaaacctcgcaagcaggatttgagaaaagagcaaatcttggagttctgtgttgagccgcaatacctatctgatattttgcaacatttaggattgaaagatagggaaaatcttatggaggtctatatcaatccgatgattggtacaggggtattggaaatgacggagccggacaatcccacaagccgtaacaacggtaaaagtggaacaaggacttcaaaagtgagtttataataggatattgcggcttggacgcatccaaccgcacacgaaaacaccgcccacgtagaaaaatgggcggtgttattcggtcgctcgcttattcaggctcgtgtaccgcttaaaagtacggcaagttgccggtcgcagaatttgtcgtattcctctttgtccgtaccgctttcgacggctcggtcaatgacatcgcccaactcgtcgaagcatacttcctcattgacgcactccgcaccgttctctttcagcagatatacctcataataatcggagccgttgagtgcgataacgacatttccggcgtgcaaccgcccgtttactttaatccgcaatgccggcaaatcccggaataccgtagcgacaaaatcgccgattccccacgacataagaatgggcatgggtgtaagtgataccaattgttctttgatggtctgtgcgatgtgcattacatactctttatccataactttgatttttaatatgattattgatttatgttagttgaaccattcggggttatcctcttttaattccgtgatgagttcatcgtccggtaatttgagggttttcgcatcggtgaaaaagaaaacctcgtcatatatttgttcggcttccttacttgcaaaaccttcgttttcgtcctcgaaactgcccggatgaagtgcatcgagcagagcggtagagccgataagtaattcttcaccttcgttggatttcacgatacggcagatgtagatattgccgtcaaattgtagttctttcgttttcatacatctgttatcttaatgggatgtgtttcccgtgagccttgaggtattccatgatgcacttcgcttcctcgtgcgatgcacggttgcggtcgtcgtagttgcgtgtctcgtccgccatgaccacgatacactcttttaccaacctgtaaaggctttgctgcagtgtggggtgcatttcggggatagcggctgcaaaccgtttggggttgaagccgtaatcgttcactgccctttcccagtctttggcgagctggtactccttgctttccttgatgttgtccataatcttgaattttaatgatttgtttttttcttccctccgttcggttcctttctgtcggaaccgctttgggattttatggatgcggtacacggttgtcggtacagcttcatacggaaggcttttcctgccaattactctttctgaggaaaggaagaatttgcaggaaattcactttaagccgccggatcaagcgcgacggccgacctttgcatctgataaaaccaaaccggggctgacaggggacgaagccggggaaacgctataaaagggaagttgaaaatggtaaaaaagagaggaaacggaagctatgaatggaagaagggcgggtggtgacgggttcgtcagaaagttagaagaggtacttgggtcctttgtccggagcatacaaaaatgaatagagggcggatttctccctccccctatccgttatgacaacaacatttgtcaggcagctatttcttccgcttgcggttcggtctgtgcttccgcttcgggttgcggttcatcgggttgttccgcttcctgcgtggcttgttcctgcaaagcggctttcttttcctcgatgcgttggtgtcgcttttcgtacacttcattatatccgtcttggatattggcaagttcttcgggcatatgcttttgagcgaagtcaagcaacagggaggctgtggcgttgttaccgaatgcgtccttgaaattggcaatcagataatccctgcggataacggctttctgcttggcggtaaggttctcgatgatgcgcattttgtcctcgctcgtaaggtagtaataagagcctttatcttcaattcccacctcattgaaatgctctttgcggagtgaggagagcaggaagaaatacaccattttctcctcgtcctgcccaaatttgcgctctgacatatcgacctctaaaatccgctttttggtgtcttcaacggtcttttcgagggcaatctccttgttgcgtttgtcctgcttttccaacttctcgataggtgaaagcggcattttggttgccgtaccgtttgcggttgtagcggtatttgcaacatagcacagtgtaatgtcgttgctctcaatacggagatagagggagatttctcctgcttcgcttcgggtgcggattgcttcgcatttctcggtgtagccgttcaatttctgctcgtaatcctttactgcttcctcgtattcctcggtggtatcgtaatcctctttttgaggagcttgggggcattcggggtatttcgttgcataggttttaagactttccacctcgtagcctatagcggtaagtcggtcgacgacggcttcattgtaattgtagctttcgtggcagaggggaacggcagggtgctgttccatgagccgcatagccttttcggtaaggtgcgatgtgttcatttccacaagacaagcacggttggcgcaatttccgcaactaccctcacagaataacatcatgttattggtattgtggggacatgaaagacaaagggttttgtcaaatgaatagcgattgaggtctgcggtatattgccgttcgatgctctgtgccacctcggaggctttcatgcctcgccaactattgtactgcaccccctctttcagatgttggtcgtacacctcacgctgtatctcttccccataacggcagatttcacttgccacgctgattgtgatttcgtcctgttccaacagcacggcgatttcgggtatcaaggaaacgaatttaagtcgtgtacggatatacgcttccgtcttgccgaactgcacggtcaaggattggacatcgtggcgaccgctgtctatgagtttttggtaggcattggcttcctcaatcggggtaacatccttgcgatgcaggttctcggtgattgccatttcctcggctgtctcgtctgaaatttccatgacggtagccggaatttccgccaattcagccatgagggaagcacggtatctgcgttctccaaagacaatctcgaaacggttgtccgcaatagggcgcacaccgataggctgaagcactccctgctgacggatgctctcggcaagttccgcaaggcttgtctcgtcaaagttcttgcgtgggttgtaactgctcgactgaatgtctgccaatgctaccgatgtgatgttcttctctactgcttgaactgctgttgttgccataatcataaaatttaattggttgatatttgttttgttatttttccctcttttcggttcttttttctgcctgaaccgcttgggatttacagatgcttcaagggactgacgaacaagctattttcaacgctttttccggaaaattactctttcacggaaaggaagaattttacgagaaatgcacttcaaagcgatgaaatcaagcgcggcagtccaaatttgcgtctggaaaaccaaccggcgatggcaggaacgagaccggacaagcggcaagaggaatggatagaaaggggaaatgcagcattgcagctataagaggcgaatagagcaggagaacagccaggggtataaacgggaaaaccgctaccttgtggacatgtgccataagatagcggtatggtataaaagttgattgggcggattgccgccccggttatttctcgtgcttttccaaatactctttcatcgcctcgttcacaatatttcggagcgacatattcttctcgatagcgaggtatttcatccgggtatgaatactcttgtcgataacaaaattgcaatgcacggcaggttctttttccgctttgaccggtgcaggctctttcttttgcgtggacttcccggtggatgacagcaagccgtccagtccgcttctcatgccgtttttcaatgaatcacttttgctcatatcgtctttactttaatttcaacacttcttttgctaactccatgtagtcctttgccccgttgctgttcttgttgtattcaaagatgttcagaccctttatcggagcttcggccaatgccacattgtcccggatgacggtcttgaacactttgtcgcagaatgattcgttgatgagttccgcaacactcttgttgagcgtcttgcgcttgtcaaactgtgtgatgacaattccgccgatgttcagattcgggttcaaacgggttttgacaatctcgaccacatttgtaatcttcgccattccgcgcatggcgaggaattgcgcctgtaccgggataatcaagaaatccgcagatgtaagtgcgttgagtgtcagcaaacccagcgagggcggacagtcaatcaggatatagtcgaatttacgggtttcaagcaattttgcaatcagccctttcagtattaattcccgccccggctcattgataagctcggattctgccgctgacaaatcaaggcaggacggtacaacggaaaggccattatttaactcgaataccgttaacgggtattcacctttcattgctccgtacaccgtccgttcctcttcgatggagagaccgcaggattccgtgaggtttgcctgaccgtccatgtcgatgagcagtacacgctttttcttctgctgcaatgcggcagcaagattgatggtggtggtcgtctttccgacaccgcccttgtggttcaaaacagcgattatctttgccataaattcctatctttatttctgatacaaagatactactatttttagtatttactatgattagtgtgtactattttactactttattacattttagtatcgtagtatctactactatactaaaatactgattgactaaatgtagtgcatactatcctttgcaacgggagatttcctgatatcctactttactaacattagtatgtactacatttagtatcgactgtatagcagtgaagtaaagcctatttgggaggtgtatataaatggatattgccgccatcagatcggagtacaagaaaaatccccctgtcgagttatcgcaaccgaacagagggaaaaggttaagatatgattatggtttaagcggccttagtagtaggttcgtattcggcagccgttgtttcggatggagttagagagcgttccgcatccttgagactttcgtcaatcttccgctgcagctccttgcactccagtttgagttttaccaattcatcggctttgctccactggcggccaacgatgtcctgcaatatggggatttcgctttcaatccgctccaccgtcttttgttgcttctcaataagtgagggcaatttgtttagtgtagcctgcggatattgagcagattccacgaagccaagcggtaacgcacctgtcagtccacaacggtatttaagcccgcttgtcccctcgacaaagaacgtgtttcggtcaaatgtaccgtttatgctgtactcgctgcgtaccagcaaattcagccctgtaaacgtgccaatcgtaccatacgctccgctacggtaggttttggcgatgcggtgtaattcccggcctgtttcctcggctgtagcttgtggcaggttgagaagttgtgttacttttgtcccctcgtaagagttgaagtattcccaatccttgatgaaaccggcctttgtacgctgtgtctttgccatatcttcctgtccggcggttattttccgctcggcacggatgcgttctttcttgaaaatggtctgttccttttccaactgcataatcttgttgtcgagttttgccttgttcagcaaatcggtgttgccggaaaggattgccacgaactcggcgaagttcatgccgttgtcctcgtccatgccgccctcgtcgatacggcgcacggcgattgtgccgttattgatttggttgatgaacatctgcttgtttttcagcaaattgaatttgtaggcatcaagtgtcttttccgtgccgtaaatcaccacatccaccacgttgccgccccacagtttcacggtgttgcccttgcgtaccgccctgccgttgcgctgctccatgtcagccggtcgccagggaatctccaaatgatgcaccgctacagccctctgctgggcgttcacccctgttcctaacatggtggtgctgccgaaaagcacacgcaccttgccgttgttcatgtcctcgaacaggcgttttcttgccctttcggtggtagcacactggataaactgcacttcatcggtcggaataccgaggttcaccaacttttctttgatgtcggtatatacgttccactcattcggcttgtatgtgccgaggtcgctgaacacgaactgcgtaccccggttttcatttgagcgcatataatattcatagattgttcttgcacagattgaagccttgttttcggcatcgtcgctgaacttgtcgcccaacaaacgcatatcgagagccatttttcgtgccacattggtagctaccaacatttttgccttgtcgagattgtcgggttcgggcgtatcaagtcccaaatcctcccactgtccgctgtgtgcaaaggaaaccaaacggcctatcatttcctcctgctggatagtgggcgcatgagaaagaaagcgcacatttttatccggtacatcgaggtttatcatgtcggcggtgcggtagtcggtaatctcacgcaggaacattgccagttccggcactttgatgtaggtgcggaaacgctctttacgcttgattgcacctgtcacgttcagttcataatcggctgttttctgcgtaaatatcgccgcccacgcatcgaagcaagaaatctgctgacgttgcaattctcttggtctaaggtacttaaacatcacatacagttcggtcagggcgttcacaaccaccgtgcccgaaaggaatgttgcgccgaggtcacgtcctgtccggtgctgaatgtcacggatggcaaacagcaggttcatcgccctttgcgagcctttggtattgccgataccggcaaccctcgtgtggcgtgtctgaaatattaagttcttgaaaatgtggcattcatcgacaaatatgtggtctatgcccatcgagtgaaagtccaccgcatcgtctttccgctcgttgattttcattttcaattccttaagtttggctgcgaggttctgtttgcgcttctccagaccgtcctgcatctttccgctgcggtagcgcatggtggattgttccaagacttccaaattgcgctccacatcggccagttcttcggtgaatatatctatcatggtctgttccgattgcggtatcttggcgaactggtcgtgtgtcagaatgatgcagtcccagttgttgttcttgattttcgagaatacctctttgcggttagcaggagtgaaatcctctttgcccggataaagcacctttgccgaggggtaagccttgcggaacgtgtcggctatttcgtgaacattggctttcaagccgataatgagcggtttctgcaccaatccgaggcgtttcatttcgtaagcggaaacgcacattatcatcgtcttgcccgtgcctacctcgtgccagcagataccgccgccgttctgcttaatcatccaaatggcatctttctgtgagggatagaggctgtcatacggaaaattctcgaaagagagctgcgggaaggtctgtgccgagccgtcataatgcggacggacatagcagttaaaccgctcgttgtacacccttaccaattcgtcccttacctctatcggctgacagtcgagccactggttgaaacggtttcttatctcctgtatcttggtggccgcttcctgtatggcttcctcgtccggcactcgtaccgcttcgccgttccgctctatctctttggttatttcgggaacggtgtcctgcagggcgtgtacgaacaaatcctctccgttgtaattctttacggaataggtgttatagactacaggggaatatccttgtagccgcactaaataggtgtcgttcacgtcaaaatacatcacatcggtttccgttccgaaaagttctgtggcaaaatcggcgtacagcttcgtgtcaatccaacgctcgcccatgttgatgtcgagttcctcgtagggtatcgcttcgggtatggcttcctccaatgcctttacagcggtttccgtccagtccttttccttgcctgtgagatcgggaagataagagcctgtttccttgcttttggcgatgacgtttccggctatgaacttgcctttgtgttcccattctccggtggcagggttatagaatatctcgcctttgaggtcgtcgataacctcgtcctcgtccttgcctgtggtctgcatcagatagtccatatccacacagccgtaaaagttaaggcagcttgccaacgcttcgcccggtgtcagttgcacggtcgtgtctatcttcttgaacgctacaggctcacgcatgatgtcggatttgaatatgtcgcccttgacctgcatttcaatcgtgaacacttccacgccgaggctgtcaagcatgataaactccttgttgtcattagagtggaaaaagccccatttggcgacaaaagcatcatagcaagcgttcagccgttcacgcaaatgcggctgttccgtctgttcctcctgctctttgattgcaagttcaaaatatgccttgcggatagagaaatagtcgttagccctctccgtgttcaccttgccctcgtccaccgggacaaaatcggtggccgtctcttggtatagttcggatttgcggtatcggataatgcccacctgcccctcaaacagtaccattgcaccctctttcatccacgcttccggctcgtccgtataggctcgtctgccttttggtggctgcttaacggccacactgccgaaaagggacatttgcgtgtgtatgccgtcctgtccctcacttgtgaaaaggcttttgcggaaatagcggccaaagtcgagtttgagcaatgcggcgagatactgcgacatggcgttttcatcaccctgccactggtatttgcgtacatacttgccgtactggttcatcgcaatgcggctgcctgtggcgagggtggttttcggtaatgtgaaaagtttgttggcgtattcggtcattgcgcctgtcgtgtctgccttttccctgccgacctgtaaaaagagctgttccctctgcgagagtgccgccttgtgagtatgcttttggaagatcagtaaatcgctgcctacctcgatgccgcttgtgtacatgaaaagcgtgtcgggcatacggatagcactaatcaaatcggcatggttcacaaggtattcacgcacgaatttgttgcttggtgtatcggccacacctcttgatgtgacgaaagccagcaggccgccctcgttcaaaagctccaaagccttgacaaaaaagtaattgtgtatggtcttggtagcctgctcgtatatgccgcctttcttccagagttccgcatcgaacacacggaagttaccgaaagggatgttggaggctatgacatcgaatttcgtatgttcaaaaccctgttcgtctatcgtttcaaacccggctgtccgtgtaaccgtgttgtcattcagcagggagagtatcagacccgaaaccgggtctttttcaatggcatagccgcaggtgtcggacatggctaccgggaggaaaccgccaatgcctgcactcggttcgaggaatgagcgcatttgcagctcattgtccttgaatgtggcgtgtatctgctttgcgactacatcaataaggaatttcggggtgtagaacgctgtcaggacagaggctttcatggcttccgtgaaatagggataggtgtcgataagttcctgcaaccgccttatcggttcttccatgtcgccacttacaggcttgtctgtgccgatgttcagcacttctttgataccgccaaaccccgaatattgggataaggtttctttttcctctggtgtggcttgtctgccttgaatgtggatttgtaacgctgtctttatcgcttccacgtttgccaccaatgatttcaatttgttgtaactcatatttaacctttctttttatttccctctgttcggtctgtttgcgaccgccgggaagatttttctgctttcggaaggtggcgagggacaatcggacaaggctgaaccggaaaaatacgctcgacagagggagaggaagatttttgcgtgtcactcgcggcggcacgtcggcattggcaagattggcacggtcggttacctttgcggaaaattctatcccgtaggtcgcacggcagcggacttgggtttaatgggaatccgttagaaaaggaaagattatgggtaaaagagtgaagcggtcagccgggacggactttccgacggactgtcttgggactacagagggcaggatttatcccgccccctgtaatgccaagtctgtccgtgtccgtccttttgcaaaaaggggcttcacacactttatgtaacatgttacacaaaatgcgtgaggttgcttgaagcaaactggccgcaggatgtaaggctataagagggagaacaggagttttataaaaggtcgttggtcgatcggaacaacaaaccgtaccgagactttgcccgatacggtcttgtcgttgccctgcatataactcagtctatgtcatagcctatcatgtattcatcgttgataagcagataatagtagccgttgccacaattccggtactctttgctgaatcctgccgccatatcgccattttcgcgtggctcgcaccacagcgtaccgtcatagccgcaaaagtcgaagcgtccggtggaaaacttttcaccttgcttcagtgccgttctgaaacgagccatatcccaactgccgcaatacttctcgatggtggcaagtccgatacacttgccgtcgatgcgtgtgccggtcgtgatgcggttctcgtagagggatttatccaaatcggcattagcgattttgcgaagccaatcattcgtatgcgtggcaagccgggcaagtttctggtatttcaagaccagtttcttttctatgtccgctgcatcttcgggagaggatgacggatagtatatcttctcaatgcttgcccaatctgtgaagatgtacccgcttttgcgttttccgagtgcgataatgccgatgacgttttcgttgcggttgataaacagccgtctgcgttttcctgcaatccttacatataaggatgtaggattttgttcgttgcgtagataggcttctgccggatgaattgttgttgtttccatatctgtataaatttgtataaattttgatttttgctgttcctattttggtttacctgttcaaagttccgggattgtgccgttcttatatagaacaccgttccgataatgggacacgatacccggcttaagtcccatttcctcaaaggctatatgcctgatatagtccttgtattctttgccaatgaaattctttccacaaaggttgttgaaaatcatagggacggaaaaaccgtcttcgctcgacaatatcactctgccgtcttgtctaatttcttctaccatacttgtttacttttaattggttgaactatcatgctgatttttatttttccctgctttcgtttgccgtgcaggtttgttttcagctttttgaggcagccagaggatgaagctgtggcatcataagccaaacccggatagaaaaccgaccgtgcaacagtctgttttcgtcatccgaatgcaatgcggcttggcgattatgcgcttcgtcctacattcgccgacgaaaagagtaaagaatgacctgccgataaacgagatgtgacaacaataaaacaggaaaatacgatttggtaaattgtcattgtacaatattgaacaatcactaaatatcggcacaattttaatttagtgccgatatttagtagatgatgacaaaaggttatttacatatagattgttttaaataaatacaaattttcggcactattcagaaatagtgccgaaaatttgctatatttgcaggcaaaaacaggatataatatgagtaacaaaacaacgacatccatacttgaatacgctgaagtacaccgtgatttcagcatggatgacttgtttgcctatcttcacgaaaaggttggcataagcaagtcttccttgtcatggtatctgttcaagctcgtgaatgaaaatgcattggtcagaaccggacgcggaatgtatgctaaagtcatgaaacagtcctttgttcctaaactcataggtgaagtaagagaaatttacgattcgttgctggtcaatttcccatttgcgaagttctgcgtctatcagggggatattatcgcaaccttgcagcatcacctttcttccaaccgtgttgtctatgtggaaacagacagggattcggcagaaacggttttcaactttttgaaagacgggaaccgtgacgtctatctgcgaccggacaaagatatgatttaccgatatgtagatatggacagccgtgtcttttttgtgaaaaatttggtctcggaagctcctttgcagaaagtatcagatgtaccgatgcctacactggaaaagctgttggtggatatattgagggatgcggatttcttctacctacaaggcagtgaaagcgagcatatctttgaaaatgcctttaatctgtacgctgtcaatcgaaatcggctattcaggtatgccggcagacgtaaggcaaaagaagaaatattgtccatattagaaaatctgaacataaaatgataaagaaggagtgttttacggcagaatggatcgaacaggtttcatccgaattgcactataatgataaaaatctgatagagaaagtaatccgtgccctgtccctgcttgaaatgctggttaaagccgggtgtccactggtttttaagggaggaacggcacttatgctcatacttgggaaatctgctcatcgtctgtcaatcgacattgatcttatctgtccccctggaaccaacattgaagactatctgaaatcatttgccgatttcggcttcatcaatctggaacttgtggaacgcaagcaacgggatgatgcggatattcccaagagccattccaagtttttctatcagattgcataccgaaatgacaccgatgcacaatcctatatcctgctggatgtactctacgaggacattcattatttccgtacccaacaaatagctatcaactgcccgttcatacggttggaaggaaaaccattgatggtaacagtcccgtccgcagaagatattttgggcgataaactgacggctttcgctcccaacacaactggaataccttattacaggaatggaaggtcctgttcgatggagatagccaaacagctttatgatgtggggcggctgtttgaaaatgtttcagacctgcagattaccaaagaagcgttccgtaagattgcggtggtcgaactttcataccggtctttcggaacggacatagggcaagttttcaatgacatccgccaaacggcactttgtatctccacacggggaaaagccggagaaggagacttcgacctgatacaagacggaatcatccgtgtcaaatcattcatgtacaagcagcgttatctgatagaccatgccattattgatgcagcaagagcggcttatttagccacgttaattgaaaagggaatcaatgaaatagaatcttattccaacaaccctgccgatataaaggatatggtcatccgaccttcgctgcccaacaaactgaataagctgagaagcaacctaccggaagcctactactattgggcaaaaacgagtgagttattggaagcatgaagttttacgaacatcgaatggaaaagataaaagccgtattcaactggagcgggggaaaagactccgcgcatgccctttggcgagctcgtcaatcggagctatacgacatcgttgccctgctcaccacaatcaatcgtgactcgcaacgctccagcatgcacggtatcccactccccttgcttcaggcacaagcagacagtataggtattcccctgcatatcgtgaatctcacaccccaggggaaccttgaaaattacgcagaggccatgacttgcgcagccctacatttcaaggagcaaggagtaacccattttattttcggggatatttacttgcacgatgtccgtgcctacagggagcgacaactcgcaccactcggaatagaggttgtggagccgttatggggagtagtctcctcggaaatcgtcatgcagcaatacctcgcttccggactgaagacggtcatcgtgaccacgcaagccgatggcttgggaatggatgccatcggtcgcgaggtagatgccgactttattgcctctctccccaaggaaatggatcacaacggagaaaacggagaataccacacgttctgctacgacggaccgatattctcctcacccgtacttttccgactgggaactccctttagccaaagttatgacatccggcttgaggatggcacgattcaaacctatacttattgttttgcccatctttccgccgaaccataacacggattacatttgcaatcataaatcaacaatatggaaaacaaaggatatatacatgtctatactggcaacgggaaaggaaagacaacggccgcatttgggcttgccattcgagttttgtgtgccggaggaagcgtcttcatcggacaattcgtaaagaacatgaaatataatgaaaccaagatcgaacatctgtttaacaacgtccgcatccagcaattcggtcgggggtgctttattgaaaagaagccggcacaagaagatattgacgcagcttatgcgggattggaaagctgcaaacaaattctcgcttcgggagagtataatctggtcgtgctcgatgaactaaccattgccctgtattacgagttgctttctattgaggaggtattgacggcgatttctcgacgacattccgggacagagttggtaatcacgggacggtacgctccggcagaattgatcgacatagccgacttggtcacggagatgcgagaagtcaaacattattacacggaaggcgtcctctcccgcaacgggatagaccgttagagtccgatctccctactcggtcttggtttcacaatcattcaaataaaaaattacgataagttccaaaatgaaaagttccctgttttaatcgaaaaccacatcacctaatgacactcttttcgattagcgtttggcgacataaacactcttacaacagtctgctcaaagctgaaatgcactcctgctgtgtagtccggatgtaatcgaaaacgaccgacggatcgacactcttgccatttagcttgcaggttatgtgcaagtgctcgcctgtacttcgtccggtcgagccggtaataccgacggcatcacggggacggactaccgtacccttggcggtcagcacccgtgaaaggtggcaatagctgacggtgtaatttccgtgccgcagggtcacatacttgccggacgtcttgtcctgtcccactttgacgaccaccccctccatcatggccaatacctgctcgccccgtgcgtgcaggtcgataccgccgtgaaacttcctctttccggtaaacgggtctttccggtagccgtatggtgatgtaattctgatgcgctgcaatggataagacacactgagataacggtcaatccacaacttcttactttcatcggcaggttttgtcgaagtctcctgtacaggagccatgctttcgggtgtcggctccggctttttcataccctcctgcaaggcttctaccttgtatctttctggtgtcttggcaatcgtgttgaactgcgcctgagcgggcatcgtgcagaatgaaacacccgatattgctatcagtaaaatttttctcattcggcaaagttataacgggagttttcatgtcggaaacaaacagccgtcatttcttgtattggtttgatattttgcgtctattagtacgatttgaattgaataatcgtactaatgaagataaaaacagcatattataaccatttatatagctgtatttttgtccgtcataataagatgtctctatctttgtatagtacaattttataatatgaatatagtatgaaaaaagttcagattgaatttgatgaattaccttttccgacactggaacgattcggtctcacacgggagatgattgaggatttgccgatgcgtgtgttggacgacatctgcgatggtcggcattctcccgtgcttcccgtgcgtgtcacggacgagcatggcgggcaaatagagagccgtagccgctttgcctttatccgcatggacaacggtcaggtggatgtggtcttctatccggcactgaaatcctctccgttggaacggtatgacgaagcgcagcagaaacagttgctcgacggcaaggcgattgtcgccgacgtggaaatggcggacggccggagcagcaaggctttcgtgcagattgacaccgagacgaaacaggtgatgtatgtccccacgcccatcatcgcacgcaacctgaaagtgctggccgaggtcatgcgcctcggtgcggtggaggtaaacgggatgcagcacggcgagccgctgacggtcgtcgtggacggcgagtctgctacagtgggcatagaccttcatgccaagaccggcatccgcttctgttcgggcgacgcgcagcaatggcgcaaccagcccaagcgcgagtgggacaaatacaccttcgggtgctacggttgctggatcatggacgatgacggcaaccttgactacgtttcggaagaggactacaccgaggagttgtggaacgaacagaagaagagcggcgaacgcaaccgtgcggcagccctccacaagtaaaaacaatcaatccgtagattatggcacaaaacgaatattatcccgaagaggtacttgtcgggaagatgcagagcggcgaatacggctggctcgattacgtcaatcatttctccgccgactggcaggaggaatacgcccgttactgcgaggaaaaggggcttgctgtcggcaacgaatccgctgccgagtttgtccgcttcaaggacgaacagctggaggcagcaatggaacgcggcgacgcataacgaaaacaatccgactatggcgatacgaacgaataccaatccccggcagatggacttgcagcccgaaatgcgcaatatgctgatgcgtaacggcctgcaagcccatgttgcgcttgatggttcagggtatcggctgattgtgcaggggcataattctccgctgctggtctatccgataagcgaacgtcagatgttggcactcacggactggggaaccaatacggccaacaagaaagcctacaacgtgctcacgagcatcgtgggcaaagacttctatatgcccaagaacttcgtccatgcccgcaatgccaacgggcgtgtggctatggggctgcacggctaccgcatcggcatcggcgagtacggtcgcatgggacggatgggaatgcccccgccgttcctcggctggacgccacgcaaccagtggggcttgcacctgcgcagggtcggcggccaactgttctttccggggccgtccatcgtacccgaacgtcccgacgggcgcatgaagcccggcgagttgcaatcgggcggttacggattctattacaaggggcatcaacaggcgcaacccgtacagcaacgggacgttctgcaggacttgcaggcggtcatcacgccgatggtcagccgtccgcgcagcggggaaccggcacggtcgtacaaggagcttatagcctctccggtctatttttccaacgagaaattggcggagtgccttgcctcgcacggtcttgtcgtggatgcggaaaggcggacgctgactgtgcagtcggaaagcgtccaagccgatatggtctatgacctgacggaaaaggaagtgaggacactggttgccgcacccatcgaggaacaacccgtagaaaaacgtctggaactgctgaacggcattatcggggctgacttttccgacaaagtgacgatggaggctctcaacagcgatcaacgcatcgctatcggcctgcatcccgaagtacagcaggatttggaacaacgccaacggcaggagcaggaggctttcatgccggtggaaacctcgctgcaacagcaagaggaatccatacagggctatgtcggtgcggcagtggacgggcgtgacctccagtttctgaatgaaaacaagggatggtatcgggaagagaagcacgggcgggaagttgaagtgagccagatagccgttcaaccggcacaaaccgaggggaaatacaggatgaccgctgttatcgacggtcaggctatcagccatgagataacccaacgggattacgacaagttccttgctgtggatgattatcaccggatgaagctcttttccaagattttcagcgaagtggacatgaaaacacgcccggaagcacaacgggggctcggtacgaaaatctttgccgccctcaccgcaggtacggtagtcgcggcgggtgtcgcgcacggcatccaccatcactgccatgccccggagttctacggcgagtgtttcggcggtccgccacgcccgtacatcaagctgggggtcgatacaccgagggatatggccatccgttgtttcgaggcagagatgaaccgtgaaatcaatgatatgagaatggggaggtaaaccatgagagagggcgaactgacttatgacgattttctgcgcaggctgaacattcaggacgtgcttatcgacgcgggctatcacctgaaccggcgcgacggcctgcgctatccctcgtatgtccggttggacagcgaggggcggcgcatccgcaacgacaagttcattgtcacgcagcaagggaaatgctgtttcaaaccgcaacagcagaagtcgtataacatcatttcctttatcaaggagcatccgcatttttttgcggaataccgtacaggcgtgtctcccgaccgactggtaaaccttgtctgtaaccggttgctgaaccatcccgtcgctgaccgggacatccggattatccagcctaaacgggatgtgaagccgtttgacatggcggattacgacattcaccagttcaatccgcaggatcgggcgacacaaaagaagttctatccgttcttcaagcatcggggcatcgacctttacacgcagtatgcctttcatcggaacttctgtctggcgacgaagcatcgtgaggacggcatgaaatacaccaacctcgcctttccgctgaccgttccgaaagatacgggacaggttgtcggtctggaagagcgaggccgccctcgcatggatggcagcggcagttataaagggaaggcggaagggagcaattcgagccaagggttatggattgccagcccagccaaaactacgcttaccgaagccaagcatatctactggttcgagagtgcatacgacgcgatggcctattaccagcttcatcaggccaacgacaaggatttgcggaaagcggtcttcatatctaccggcggtaacccgacggtggaacagatgcggggtgtcctcacgctctcgcttcctgccaagcaacacatctgtttcgataccgaccttgcgggaatcgagtttgccaagaacctgcaacaggagatgtaccgggttgtccgttccaccatcgaggagacaccggagcggaagccttatctggattccgttactgacggcaagaacctcgatgaaggtgacatagacctgttgcccgacgctttgcggtcgagctacgggaaatatgaatccgcatgggaagaagccatgtcgatgcgttcgagcggcctgtgccatccggacgacatacgggaacagacggatatcatgaacggaaattacaaggagttccgtgaaggattgcgggagttcctcggtctggacaaggcgaatgacgcctcttttgtccgtgaacagcctacctatcccaacaaggactggaacgaacagcttttggccgagcagaaacaggaagagacggtcgatgagacacaggcgagagaacagtcaccggaagaggaacaacaaacacactttcgccgatgatgaccgatgcacccacaggacatttccaaagtatcgtgctgcaaccgcacgccggacagttcgttatcgacgagctgcccgcaatcgtattgtgctgtgcagcatgggtgtatggtggcatggagggactgcctctgacagctcttgccgtatcggttgccgcattgcttgctttggtattgctgtaccgtttcatctatctgcgccggacacgctaccacatcggtagcgagcagcttatcagcaggcatggggtgctgtcccggaagacggactacatggaacaataccgtatcgtggactttgtggaacaccaaaacctcatgcagcagctttgcggattgaagacggtacgcatattctcgatggacaggaatacgccccggcttgatttggtaggtatcagacacaacttcgatgtggtaacgcttatccgggaacgggtcgagtataacaaacgaaaaaagggaatatatgaaatcacgaatcattagcctggtcatttttgccgtctgcatgatgccacactgggcgaaagcacaaatcacggcatccaatccgttggaatggatggcgttggccgagggcaacgaggtcatcaatgaccagatagagaaacagataaacggtcagacgaagacagcgatgctgcagaacagcatcgccgccgagttcaaccgcattcacaaatgggagaagcaatataacagctatctcaagacggcaagcggctacgcttcgtcgctgaaagcctgcacccacctctacaacgacggcgtgagaatctttctcacgttagggaaactgggcaacgccatcaggaacaacccgcagggcatcattgcctccataagcatgaacaacctctatatcgagacggcaacggaactggtatcggtcttcacactcctgaatgacgcagtggccaagggcggcaaagagaatatgctcacgggagcggaacgcagcaagaccctgtgggcgttgaacgacaaactttcggctttcagccggaagctacacctgctctacctgagcatacgatactataccctcaatgacatgtggaacaatgtgacggccgggatgctcgaccgcaacaatggggaggcggcacggatggccatgacccgttggcgcagggctgccgtcctcgcacgataaaaacggaactgacaatgaaacggacgatttggataggcatcttattgttgtgcatcggcatcggcaaggcacgggcgcaaaacgaccctgtactggccggaatgatcctgctctataccgacaaggcggaaaaggagctgaagaaacaggagaaagtcatgctgatgcagaccaccggacacctgtggacgaaagaggaagtgaaagccacgaccgacctgcaacgggagttcaacagctatctggactctttccggtcgatagtctgctacgcggcgcagatatacggtttctatcacgaaatatcgaagctgacggataacatgggtgactttaccagacaggtgagccggaacagctcccatgcgttggccgtcgccctctccacgcaacgaaaccggatttaccgggaactgatcatgaacagcgtggagattgtgaacgacatccgcatggcgtgcctttcggacaacaagatgacggagaaagagcgcatggaaatcgtattcggcatccgtccgaagctcaagatgatgaacaagaaactgcaacggctgaccaaggcggtgaagtacacgacaatgggcgacatctggcgtgaaatcgacgagggagcacgtccggtggccggcaaacgggacatagtggaagctgccaagcgacgctggcggcagattggaagaaatgtaagaccttaaaaaacagacaatgtatgggcgtttggagtacactattgaaatatggcggcaaggccgcaaaaggtgtcggtacggcaacggcggctaccggcaaaagtatgggtaaggcagtgctgcacccttcgcagaccttgcgtggtgcaggacaggcagtcaagacagcgactatcggcggtgcggtcggttatgtgggctgggagaagctgaccaccgacaaaagcgtggtgcgtatcgtgagcgatgccgttgtgggcgaatccgtcacggataccattgcaggcacggcggacggcgtgcgtgaactaacgggcaaggccggagaagccgtcagttcggtcagcggtgcggtaaccggcatcgacaacaaactgaacggcgtgtcgaactttttgcgacaggcctccggtggcggaggtcttgatatgttcggcaactttttccgcaaccttggcagcggcaacgtgtcagggttgagcatcgccggactggttgcggcggcgttcctcatattcggacgcttcggctggctgggcaagattgccggcgcatttctcggcatgatgctcatcggcaacaatgcgggtgtcttccgcacgccggagacagaaaacgtgcaacgtacccgtacacctgacttttcggcaggggaacaggcacatggcggaggaatgagaagatagaatacgaatcaaaatggaaacagcatgaaatatacagaagaaatgatcctgcaatccgatagcggttattgtatgcctttcgaggaacagcagggcaaagacgtggagctgtcgctcggctacggcgaacagaccgacccggtgacgggcgagaaattctttcatcacggcattgacttcaacgtgcggtgctatatgctttccgcccttgccagcggcattgtgtcgggcgtgggcaacgattccggacacggcatctgccagaccatccgctacggggaatatgaggtgacatacggaaacctgtccaatgtcttcgcccaattcggacagcgtgtaaaggccggacagacggtagctttgagcggtgacaaactgcacatgaccgtccgcttcaagggcgaggaactgaatccgttggaattcttgacaatgctgtacgggaatatccaggcaatgcgtcaggccggcggacacgaaaccgactatccctccggtgtagagatggaactgggaaccgattatgaccgggataagagagagatagaggaactgatgctgcgcttcctgccgcactatatggaggatttgcggcatggagcatacaccttgccccgaaatacggagcagtcgctacgccacatcttcacggtgggtgcgatgaaggagtatttctacgagaatatgccgagcatggccaatccgctcggactgggacataaggccatgccgctggcctgcaaggtgcagaacctcctgattgcggatttcctgcattacctcgccctgcggcatgatgtgtacctctccactgcgggcagtgacataaaaaaaaactccatgacgaagccctgacctatggcggcatcatagacccgttggcggaactggacatcgacatacagagtttcgacataccgaggcttgtcacggtctatcccgaccgggcgggtgtgcgctggtggacgaaggcatggttcaacaacagggaagagggcgagacatccgtcgaaatcgaacgggagcaggcgatacggttcatgcaggacaacatcgaaaaggacgcatggctggaagagttctttccccggcagatggaggtttaccacaacgccatcgagcagacgaaagaacagttattgaaacagataaatatataatacacaatatggatggaatcaaacatagccggcaattcgcagaaatggaacgcctcgtgagcgactatttccactgccaccttgcgcccgtcatgtcgaagacacaggcttacctcacgaagaaacagggcgaggaaatgagggagtattccacctctttgggcggcatactcagcgcgatggcgtctgcggcacagccgatgggcgacccgtaccaggtactcaaggtcacgggcgaatggaactcgaagacaacggaggactatatcggaatgtgcaaggcggagattaccggctccaaagagatacagcaagacctcgcatacatggccgggcaatggcgcgatactgtcgtgcaggaaatcgggcgcaagcgttacgatgaactgtcggaacaattaggcggcgaccttgcctatgcctatatggactaccgggtggaggaactgatgatcgaccggctggtcaaggagcgtatgccgaaatcgtcagccgactacatcatccgcaaagccgcagaatcaagcctgcttggactttcgcagaccttcaaccgctcgccgcttgctgtggaaatcgaggcacggggcgaagccgcctaccgtccgaaaggatgggaaaaaggcgcgggtcgggtactgggcgcaacggcagataccgtgatgatgggaggcgtgggttcgtgggcaacactggcgaagtttgtcggggcggacgtggctatctcggcagtcgcctcacgcttcgagcctgaaaagtcgcccaagctctctgtggagcaatgtatcagcaaaggggtgttcggcagcgaacggaacgtatttacggacttccgcaaggaggctgcaacggtacagacgggtgacagtgcgctcatcgtggccgccaacgagcggttgaagaagaaaataccggtgatggatttcagtttcccgaagtggatgcagacaccaaagtttacccctttccaaatgccagaaatacccggacaccctgaaaagaagaatgaacgtgccgaacggtacaaggatgtgccgctggtcgtcgctcccggacaggaagaagcctatttgaagcatttggagaaatataagaatgcaacggctgtaactgccaaaaaggaatcaacgcagccggagacggaacagagggaaaaagtggagaaagaggaacggcaggtggttattccacgtgaggaagaaaagcaagagagagaggctgtgcagaccaacacgaacggatggagcggattgctcagtacgttgggattagagggattgggcgatatcacgggcaacctcggatatgtcatggccatgctgcccgacatcctgttgggggcttttaccggcaagacacaatcgttgcgctttggggacaacctgctgccgatagcgagtattgtggccggtctgttcgtgcgtaacccgctgctgaagatgctccttgtcggtctgggcggcgcaaacctgctgaacaaggcgggacacgaggctttggggcgacccatgccgtccgctgccgaacagacggagaaccagtaccgccgttatcccgatgaaccgctcaatccccgtattgtgaacccggtactgcaaggcagtacgctcatcgccacgatagaccgtgtgccttgtaccatccagctcacgccgaccgtcgcggaggcttaccgtgcaggggcattgccgctgaacacgctggcgaacgccgtgcttgccaagagcgaccagttgcgccatatcgcttcgcagaattacgatgacggacagcgggaaacggtcgtgcgtacacggggcatccaataattccatgaacaataaaagcatgatgatatgaaagaaaagtcgcaaatcgagaagaaagccgaggcaaggcaggcggaactgctgtctgccgcactgagcggggcgtcgaacgctggcggccattggctcaacgtatcgggcaagggatttccccggctctatccgcaaggggtctcggccagcccgttcaatgccctctttatggccttgcattcggacaataacggatgcaagaccaacctgttcacgctttacagtgaaaccaaggtacggggtgctgcggtgcgggagcatgagcagggcgtaccgttcctgttctataactggaacaagtatgtcaaccggaacaatccggatgagaccatcgaccgtaccgcctatctccaattggacgaagagcataaggcacagttcaagggtgtccacaaccgggagatccgcacgcttttcaatatcgaccagacgacgttgccctacgttgacaagccggcttacgaggatgcggtaaagcaggatggcagtgttcaggaaagaggatataccgaggcggacaaccgcaggttgcgcacccggttcaacgactttctattgaagatgcgggacaacctcgttcccgtgcgctcggacggtagcggagttcctcattacgagacggacaaagatgcggtctatatgccgcgtcaaaaggattttgaacattaccacgattatatgcaggaagccttgcggcagatcgtgagtgctacggggcatcaacagcggctcgcccgtgaaggcatggtcatgaagaacggcgtggccccgtcggaggatgcggtaaaatatgaaaggttggtcgtggaactggcttcgggtatcaaaatgctggaactgggactgcccgcccgtctgtccgatgcaagcctgaagacggtggattactggtgccgggagttcaaggaaaatccgtgtatgatggacgctctcgaaagcgacgtgaacaatgcgcttgatgttatccgaaaagcggaacggggcgagaaaattgagtacgccaccctgcgaaacagacggcagaccacgaccatgcaggaacagatgcacaagcattactttgtggcgaatgaaatccgccagcacccggacaaggcggcgaaaagcatcgtcctcgtcatagaccgggaggcaaaatcggcagatgtcattttgccggcaggagcttcgaccgaggcgaacaacgagattcccggcatgaacaagggacgtatcgaacgggcattgcagaaagagggtatcgagcaggtgcgtttctataatactgacggtgcattgggctacagacccgatgacagctatttcaatgaaaaaatggtgacactggcccggttaaggaactacacgttggaaaagctctccacgctggacgtgtcggaggcggtcagacgggcgaatgaggtcgggttcgatgccgtgcagatgattcaggacgacaagaaccgttgggcactctatatcaagccggaaaacaaggaggggtacagcgtctatcccgataaggaggatgtgaaccgttttttctccacgctcaagcaggcgatggacaacatcgacaaggtacggatggagctggcgcacaagtattatgcactggcggaggtcaagcccgacctgaaagtggatttgttcggcagcgatacgccggagattgacctgaaccgtattcagcgtgttgccatcttcaagaccaggcaggatggaatccagtgtgtggcaaccatcgacggacaaaagctgcagccccgcagcgtcactccacagcagtggcaacggatgtgggtggcggaagaccgggacggctacaagcggcatttggcggccacgctgtttgccgatgtgctgcaaaagggacaatccgtcggggaacagaaagcggaagagcaggtacggcaacagaatgagacggtgccggaaaatcggtcggaagagacgaatgatgaaaatatgtctccgaaacggcagttttgggacaacctcaaggaaaagcatcccgacgccctgtatctgattcgtgcaggagaagtgtaccggctttataatgaggatgcggcaaagggagcaaaaatactgggaattacggtcaaggaatatccggaacatggattttcgactttcgcagagttcccaaggacgcaactggacagctatctgcccaaacttgtccgtgccggtgagcgtgtcgccatcagtgagatagagctacaggataaacggcaggacgagcaggaaacacataggggtattcatagataaggagtgacgattatgagcaagaatcaggaatatgcactgcaatacgcggattatgcgatggcacagatgcgcaggtatggcattccggcttccgtcacattggcgcaaggcatactggaaagcagcaacggacagagccgtctggcgaggaacgagaacaaccatttcggcatcaaggcgacaccctcgtggattgccggaggcggcaaatacggaatctacaccgatgataagccgaatgaaaagttctgcagctatgacagcgtgggtgattcatacgagcatcactcccgctttttgaaggagaacagccgctatgccggttgcttcaaactctccccggacgattacaagggctgggcacaaagcattgagaaagccggttacgccacaggcggcaagtatgccgagaacctgcaaaaaatcattgagcagaacggcttgcagaagtatgacaggcaggtgatgcaggagatggcggcacaaggcaggcagttcggggtagaacacaatccgctccagacctccgaaggtgcggaacatggaacggggtattcgttcccggtggaacgggaggaatttctgttcattacctctccgttcggaacacggcaagacccgttggacggcacaaagcaacagatgcacaagggcgtggatatacgttgcaaaggcgatgcggtactggctacggagaacggcggcaaggtcgtggcggtaaaccagaacaagaatacgcccggcggcaagtcgctgacggtggaatatgcccggacggacggcagcaaggtacaatgtacctatatgcacctcaaggagatttccgtcaaggtcggcgatacggtacaggccggcggacggctcggcacatcgggcaatacgggaacacggacgaccggggaacatctgcatttcggtgtgaagaatatctatgccgacgggacgaaacgggatatagaccctgcggcgtatctggctgaaatcgcacagaaaggacatatcaaattgcaaatgctgcacaacgggaatgacctgctcgccaaatacaaggcggcggaagataccgtgcctgaaaagaacctttcgcccgacggatggatgaaaaaactcctttcgtcggaggatagcggtgtgggaatgtcgggatgcaacgacccgattgtggagatggcgatgaccgctttcgcctccctgatgctgctggccacacagattgacaaccggaacgaagaggaacagaaggcgatgatatccaccgcgatggatcttcgtaccatcgacctgaagccgttgttgccgaatatgaagaactgcgacctgactatcggcgagaacggcaaggccattctgaaagcggacaatggggaactgcgtgtctcgcgggagctgaccgcttccgagctgaaccggttgtctgccacgttgaacaacggcacactcacggaagagaccaaacggatgcgtgtaaccggtatgctgaatacggttatcctgtcggaagcggcctcacagaatttcgagcaagagatgtcccggcaacagggacagacggaaaacctgcgaagataaaggcatggcgatatggtaaaatgcgtgatgatacagctatgcaaatgtctggcgggagtctccatccttgcgttgcacgtccggttctgctacctgctgttggggtggatcgggacgctcgttgtcgtgggcgtgcaattagccatcgccggatggatggtctgggcgatgatacgtgcgcctgactgaccgtaccctccaacagttcaacatcaatcaacccatgtatcacttgtcggatgatccatgtatcattaaagacaaaaaacagatgattaaatgtaatgttacggtatgcggcgttatcggccgcgatgcgtcggttcgcaagaacagagaggaaaaggagtttatggcatttccgctccgggtacagattccggcaacgggtggacggcatactatcgaggtggatgtccgcaaggagtgcagtcaggaagaagccaccggttatcggaacggctcccgtgtggaagtgaggggtacgatgtatctcaaacgccggggtgacaagctctatttcaacctgttcgccgatgaaatctgcaatgccgctacggatgatgcggattgcgtcaagggtgagctggcatttcgtggtaaagtcggccagaatatcgaggagaaaagggataagaaagaccagccttatacggtgttctcggcgttcagtgcggagaaggtcgatgacggcttcgaataccagtgggtgcgcttcttctgtttcggcaaggagcgcgatgcgtggctacagccgggtataaaggtggatgccataggtgaaatgaacctgtcggcacataacgggaaaatcaatctttcctgcaaggtggaggaactgacgcaatatgtggcggattcgtctaactataatcagtaagtaatatggccggttacagaaagaagaatgccgacggaccgaacagcgaggacaaggctctcgacctgttcgccgaaatgatgatcgagaaaatcgagggcattcaaaaggactggaaaaagccttggtttaccgagggtgcgttgcagtggcctcgcaaccttcacgggcgcgagtacaacgggatgaatgcttttatgctgcttttgcactgcgagaaagaagggtacaagattccccgtttctgcaccttcgattgtgttcagaagctcaataagtccggcaaggatggagaggaactgccgcgtgtctccgtgcttcgtggcgagaagtcctttccggtcatgctcaccacgttcacttgtatccataaggagaccaaggagaaaatcaagtatgacgattacaagaaactctccgatgacgaaaaggaacagtacaatgtttatccgaagatgcaggttttcagggtcttcaatgttgcgcagaccaatttgcaggaagcgcgaccggagctgtggcaaaaactggagcaggaaaattcgcgtccggcaatcgaggagggcgagcattacagttttgccccagtcgatacgatgataagggataacctgtggatttgtccgattacgccgaaatatcagaatgacgcctactattccatcacgaagaatgaaatcatcgtgccggaaaaggaacagttcagatcgggagaatcgttttacgggacactgttccatgagatgacgcactcgaccggtgcggagggtgttctcgatcggttcaagccgactaccttcggttctcctgaatatgcccgtgaggaactggtggcagagttaggtagcgcactggtcgcacagcgttacggcatgaccaagcatatcaaggaagaaagttgtgcatacctcaaaggatggctcgatgagctgaaggaatcgccgcaattcatcaagacaacgctcctggacgtgaaaagggcaacctcgataattacccagaaggtggataagatagcgcaagaactggaacaaaatgtcggcgagaagcaggaaaacggagcggcggcaaaggagaagacattttattcctctgtcgcgtatctccaattttcggatgacacgaggccgcttgacgaactccgggagaaaggcgattgcgagggattgctgacgcttgccaaggagtattacgacggcaacggcatcaacgaacagcatacttatttatcagccacgaacaacaagggtgacagcctaattgccgaggatgagaatttcgctgtcgtgtacaacgggagtgtcgggggaacctacgaggtgatgttgaaattcacggagcaggaaattcgcgaccatatccggcgttacggtgtcgatatcgccggagatacaataaaaggggttgccagggagatggcggcggaacagttctccgctttggcgtatcaaaagattccggccttcgagatgccgaacggtgaagtgctatatgtcgaatataacaaggaatccgatacgcttgatgtcgggcaacccaccaatgccgggctggtcgcgcagcatcgtttcccttacgaccacaatgtcgggctggatgccaatctgcaagccgtgaacgagaagctgaacgagctggaagagtatcgggcagaactacaagaggcagaatacggcagcggtatgcgccggtaaggatggaaagaaaaagatgcggaactggttggctccgcatcttttttgcagtttatttccccaacaaaccgtctatcatagactgtaaatttgctatgtcgcaatactggttacatccccctcggtagtcctttccattttgagctgtccgtatcagaaacgaatcgagttcaattcttacgccgctgcccattcgtgacagaccggaagagtggctgatgtaaacgaacttgccgttgcgctcaatgaagcaggaggtgtcataatgcccttttgaattggaagccacctttgcaccaacggctgcggcatatttggaaatctcacgcaccaatgctgtctggaaactgcggtactcttttgaaacatagtctcctgcatctgcaagtatagcgtcctgccatttggtataaaaattctgtgccatattgatatttattattattcgttccgcaaataacttttccatttctcgccgtcaatggtcagtttgcccatttcccaatcgtattccacttccggtatattggtataagggaaatgaacggtgtagcctatctgtccgtaagagcaatgcagaggggtaacgcaaatctcccaaccgaagtaagattgcggcgtgcagtattttcgccagttgaaacgacctgcggcaatattgccgcaaagtcgtttgagtatgtcgtttgttgtcattctgtacctcctttgctgagtatggtgagttgttcgggacggtctggaaaccaataagcatcactgtcgatatatacgcatctatagccattccaaggttttctgaaagctaatacttctttggggccaaataccaccccgtagtcgtttgtaaacgccaccatatcgcctacagccaaatcactgtctgtttccatgacttcggacaaccggctgaaaaactccatgccctcggcttcacgctctttcttccagcgcataaactcctctttgtggcttcttgatgagccaataggtaataactccgatgccaaaacctctgtctcggaagagcttgttgagattaagatgatgctgtcactatccactttttcgggagttgagataattcgacattctatatcattatcggcagtgtgccaaaaaaggaggttgccttgcttgatgaaatcgtacttgctcattgtcttttgatttattgttttttttatttcccttttcttgaagccttttgacttcgcccaaaggggttgttttcatgtgcgtcacaaacggggggatgcaagaacgatgagcaaggaacctgcaatgaaattttatgaaataccgtcatctccgattacggaaagttgtcgtcaaattttatttcaggtagcgatagcggtacttgggcaatgttcgtccaccgtacctttgcacacgaaaacagacctgcggcgtatgtcggggctgtgaagggattatacccttaaaacaggaatataccggctgtgaaaccggtggcggaagctctgcagagcatatttataaaagtaaccggggagcctgtgcaaaaaagagagcaaccacccacttttgaggcgggtggttgccaatgtttcggacaaacatcagaagtggtaatcaacaactcctccgatgtagagtatcgttcccggttcaagcctacaaacaaactccataaacgtaaaggactgttcggcaaaagactgcagccatcgccatccaaatagaaatgataggcgacatccaacggattttccactgcctgtttgagataataggtcgaaccccattccaacatattatctgccgtaagagcattcgctctttttttgatattggcgacatactcctctttccattgctctattccaccattatagcgcatggtgtcatcggatataagctcgaacattcctttgggcaaggcatgattgaccaaattggcaatatcctctttacggtcttcctcgtctatttctgaacaatagtcatagaagctcccgtctccttgctggagtgtgtcctcattcagatagttttctttgtctatcggctccgttgaaatttgaaaaatcctgctgtgcataattgtaaattttagattgtcaaatattttctttttttccttttcttgaaactcttttggcttctcgtcggggaatgatttttatgcaggactgacagcgggaaaaggacggataaggcaagtaaacagtgtacgggatgaaacggaatacccaaccgcccaatgtaagagcacagtcaggctcgtccgactatgccctgcaacgaggtggggagtgaaagtcaatcttcgatttgtggaaggctgccgtgaagaatatccgggaaccgttagtgaaagcgatacttgacgaccagacgcacgctgtacctttgcatataaaatctctccgaagagaattgccgacgtgagatgaaaagagaccataattgagaaacgctattattcataaggggaaaagactattcgtggttgttataaatgcttgattaacatgaaaatacaattcgcgccataaaataatcctttcttgaaataaaaatcacagaaaaagaaacaagattaaaaaataaccattaactttgcaccagtcaagtttccaatcgaagcgtcgaacggaattaaaagggaatcccggtgaaaatccggagctgtactcgcagctgtaagtcctattaaagtttatcgcactctttgccactggtgaaagctgggaaggcgcgataagcgggatgagccagaagacctgcttgatgagatagatttagtgaccacgggataattggcattagattaaaatgaacagaggctcgtccacaggcacctatattctttttgataaccgatttctcattcgttgcaaatctgtcgcaataaaaacgaatgtgtgtttaaactttttgtttaacttttaataattaagttatgaaaaagaattttagattcttggcaatggctgttgtagcaatggccgccgcagtgttcacgggatgttcatccgacgatgacttccttgctccgtatgaggagagtgcgattcaaacccgcgcgataagttctaccaatgcgcttatcgattttgataacgtaccttccagcgtaatggcttctgaccagtatggaaacaatctctattctgccacggccaacggcaagcaggtaacgaccggctacatcactcaaatcgggcaaaccggtacgtacattcagttcccgattaactatttggaacaagaatgggtaagcggacagccttgggaatatgaattttggaatggtggttttgccatctctaatttccataatctgacacagggggattatcaaaaccaatgtagcgtgtactggcccaacggcggtcatagcggtaaaaattttgctgtagctttcggttatagcgattcatacaatgattcacaagcaacctatgacaaatgtgcgaagatttacctgaccgatgcaaccggctacagagtcgttaccacaaacactcctgtcaagggtacaccgaaatatggtaaattcaacagcgtatgggtttgtaatacgacttatacctacttagtcatgaaggatggcaactcgtttacacaaggctctttgtcggcacaaaaaggatggtttaaggtggtatttgttgcgttggatgcgacgggtaaacctacaggtaaggaagtagaatactatttggcaaacttcgattccagtaaagatgcagaatcaggtttgaccaataaaatccgtaccggatggaatcaagtggatttaagcggtttaggtgacagcgtatgtactgtagctatcaatttcgaaggaagcgattcaagcgcatacggattgaacactcctgcttacgttgctatagacgatattgatgtaaccgtaaacgaataacatgaatttggggcaaatgctttttaacggcaagtgcaaagtatttgcccctttttattatatcccaatggagattggaatcaaatactttcttcaagggaatttcagcattaaaattataaatataatgaaaaagtatttgcttttattctccttgacgatatttctatttgcatgcaacaaagacgaagaaatatcgcaggacgtgatattgcctcctgtcattgagttggatagcgaggacggaatctacgttgtaaagataggaaaagaggtcgttattgagccgacctatcagaatgtcgattacgccgtttattcatggaaatgcaacggtcgtatcatttccgacgagcctcaattgaaatacattttcaacgaatgcggttcgtattacgttaccctgcgtgtggatacgagggatgccagcacagaggaagaaattcgtgtggatgtcaatgaattggctccgcccgttatttcattggtaaccccctctatagggcttaaagttgtcgcaggacgtgagtatatccttacacccgacattcaaaatgcagaaggagctacttatttgtggactcttaacggaaacgaagtcggaacggaaaatacttatacattcaagcaagatgagttgggaacttatgaactgaccttaaccgtaacaaatgaagacggacaatcaaagaagacagtttctattgaggttgtcgataaacttccgattgaaatcgtagttccgtcatctttatattttaccgagaataataccaaatacgtagaattaggacgtactttgtttgtccgcccctttgtatcaataagtgccgagccttcttatcaatggagtttggacgggcaaccgattgagggagccaattctttggtttacggtttcaaacccgctaaaaccggagaacacacgcttacctttactgtgaaatacgacaatcaagatacaaaagcagtgctcacccgtaatatttcggtctccggtgtcgatgaagtcagtgtcaatattccggtgaaatgttgtgaagcggccggaaaaagaccttttgctgccggaaattccatttacagcaataaagtatatgaatttgttccggctccgggacaatttgtaaacgaaacgaatacagcaggtttcaatggggaaagcacgcacgaagcagcctgtgcttacgcacaaaaacgtcttgataatgaacaatatgtttctctcggaggttggggaggatatattgtagtaggattcgaccacagtatcgaaaacaaaggcggttatgatttttccatcaaaggaaatgcctttgattcgtcaaatgaaccgggcattgtatgggtaatgcaagatgtcaatggagacggcttgcccaacgatgaatggtatgaactgaagggttctgaatatggaaaacccgaaaccattcaggactatgccgtaacttatttccgtcccggtcccaacatggacacccaatggcaagacaacaagggaaataaaggggcgattgaccgtctcggcaactatcacccgcaagagttttattatcctttgtggattgaagaggattcctatacgttatacggcacatgcctgaaagcacgtaccgaacaaagcccgtcgacaggcatgtggtccaataatccgttcgggtggggatatgccgataatattggtgatgatatgcccaataaagacaatcctaacgcgggagcacttggaaactattttaagatttccgatgcgctcaatatcgacggcacgtctgcaaacctttcccatatcgactttatcaaggtgcagaccggagtcaatgtaaaagccggatggttaggggaaaattccacggaagttttcaagttctgtgatgaaaacaacaataacgacaaataaaattcattatgaacaaaatatatcatttcatcctattctgtttcgctacgctctgccttgctgcatgtagtgatgacgaccctgaagtaagcggaatagacggcaaggatcacttcatctccgagtttgctctaactgtagatggcattacctatcaagccatgatagtcggggacaagattacagttgagataccttataataccagtctgaaaggggctaccgtagagtatgccctttgcgagggagcctctattaacccgaatccatcgaccatagaggattgggagaatgaatggaaattcgtagttacctccaaaatgcaggatagcaaagtatattcctatacttatcaatatacagacatcgaacagagcggcagcgtagtacttgccacgcaagccgaggttgataattttgcaaagacaggaataaacaaaatcgaaggcagcctgaccatcggaacggcagacggagaagaaatcaccaatctggacggacttgccaacctgaaacaaatcagtaactcccttgtcatcaatccgtcttacaaaggaacggatttgaccgggttggataatctggaacaactcggaagtttcaaattaggttcgacaacttctgccagtaaaaacataatgctcaaaacggttaatctgccctctttgcttggagtgaccggtgattttgtcgttaacagttctgtcattgaaaaaatatctatacccaaagtcgagttcattggtgaggatatgtatataacttccgatgctttacttgatttggatgcaaatgccgttgaatctgtcggagcttccttaattgtcaaaggttcggtagcacaaaaagaatcagcgacaaccgaagccattgttttctcagcgctcaaacaggtcgggaatgaacttacaatccaatattttcccaaactgcaaggaatttatctaccggcattggaaagtgtggccggtactgcctcattctccgatatgtcctccatcggaagtcttgcaatgaccgaattacattcggttggaggactaactataaaaaattgcaaagaaatttccattgttgaacttcccggtcttatttcctgcggagagaccagtgtggatgcgaataaagtcaataaactcaatatagcttctttgaaagatgtactcggtgatatgactttaactaatctgctcatagaagaactggatttgtcccagataaattttaacggaaatacacttaccctacaatgtaagcaactaaataaaatcgtaggatcggaaacatttaacggtagcctttttctacttcctaaagattgtcgattgacagaatttacgttggaaggaatctcaaatatacagggtgacttccaatgcatagattatttttatgtaaaagaatttgttatgccatttattcgtgtggcaggagatatgactattgcattgaattcgggaagtgctaatacggcggcggaaatcgaatttcctaaattgcaggaaattggagggaccttaacattagggacaaataggaatgcaaataatattaccttcccgttattgaaaaaaattctcggttcatgttcagttacgacttacaaacttaagaatgatattgagtttaccaatctggaaagcattggaacggatggagctgatgcacaaattaagtttgagattgaggctactaatattctatgtcccaaattaaaaacgataaatgggaagtttgatattgcaacatcttcttttatgtttgatatggaagtagataaagtatcttatcctaacgtagaatcaatatccgaaaatctttcaataacatgcccgtattctgattttggttctaatggtattttgtccattgatttttcaggtctcaaatcagcaaaagggattagtataagcgggcaaggagatgttactgatttcagttctttcaaatacctgtttgaaaacaatgttctaacaggagaatctcaatggtctgtcaaagaatgtggttacaaccccactttccaagagatgaaagacgggaagtacaagcttgccgaatagataacgaaacaataaattttctgccaattctcggtatgcttaccgtaaggtaagctgccggggattaactataaaaataacggtatgacctatcaccaattgaaatatctgctatggagcgtagttgtcggagtgacactatccttgacatcctgcatgaagtgggactacggcgatgccgtggaagatttcaacgccacgggagccggactgttcatcaccaacgagggcaacttccagtacggcaatgctaccttgtcctattacgacccggcaaccaaacaggtgcagaacgaaatcttcttccgtgccaacggcatgaaactcggcgacgtggcacagtcgatgaccatctacgacaacaagggctgggtcgtggtgaacaactcccacgtgattttcgccatcgacctgaacaccttcaaggaggtaggacgcatcgagaacctgacctcaccgcgctacattcatttcctaagcgacgaaaaagcatacgtcacccaattgtgggacaaccgcatcttcatcatcaacccgaagaaatacgaaattaccggctatattcaagtgccggacatgacgatggaaagcggctcgacggagcaaatggtgcagtacggcaaatacgtctattgcaactgctggagttaccagaaccgcatcatcaaaatcgacaccgaaaccgatcaagtagtcgatgaactgaaggtcggcatacaaccgacatcgctggtcatggacaagtacaacaaaatgtggacggtgaccgacggcggttatgagggcagcccctacggttacgaagccccgtcgctctaccgcatcgatgccgagaccttcaccgtggagaagcagttcaagttcaagttgggcgactggccctcggaggtgcagctcaatggcgacagggacaaactctactggatcaacaaggccatttggagcatggacgtgacagccagccatgtgccggtacgtccgttcctcgaatacagcggcacgatttattacggactgacggtaaaccccgccaacggagaagtgtacatcgccgatgccatcgattaccagcagcagggcatgatataccgctactcgcccgaagggaaattgatagatgaattttatgtcgggattatccccggtgcattttgttggaaatgaagaataaattgcggcatatataccatattattttcatcacgaaaagacaggagatgacgattccaatgacaaccaaaggaatgattctcgatcagatggtacaaattttcacaaggaaaggctgtcatgtctatgcctgcaatgcttttctcaatcatgttcatatacttgtagagataccatctcccacggacttcgcaaagattatcaataaagtaaaaagttctacaggcgttgtctatcgaaaatatccggaatatgcggatttttcaggatgggcagccggatttgattcgtttagcgtgtcattcaatgatctgaatcgggtaaaacaccacattgagaaacaagagacggttcatcaggaactttcattcgaggacgaatacgaccaactgcttgaagaaaacggattcaatgcctatcaagattttatgcgggcatcattctctgcatatgctgcggtaaataaccatattaaaaacaaaaggaaatgacatatacaaaatatttacttttctcaatattggttgtctgtccatccgtgctgtctgcgcagggaatcacccggcgtattcaccagatagacgaggtgaccgtatggggcaaacggccgatgaaggaaatcggcgtgcagaagacgaagttcgattcactcgcactgaaagaaaatatcgccctctcgatggcggacatcctgacgttcaactcgtccgtgtttgtcaagagctacggccgcgccacgctctcgaccgtcgccttccgaggcacgtcgcccagccatacgcaggtgacgtggaacgggatgcgcatcaacaaccccatgctcggcatgaccgacttctccaccattccgtcctacttcatcgaccgggcatcgctgctgcacggtacttcatcggtgaacgaaacgggcggtggactgggcggtctggtcaaactcggcacggctcctgaagtcgctgaagggttcaacgcccagtacgtgcagggcatcggctcgttcaagaccttcgatgagttcgcccgcttcacctacggaagtgagcggtggcacgtctccacccgtgcggtctattcttcctcgcctaacgattacaagtacaccaaccacgacaaaaagataaacatctacgacgaggataagaacatcgtcggacagtatcacccgaaagagcgcaaccgctccggggcgttcaaggacctgcatttgcttcaggaagtgtattacaataccgggaaaggcgaccgtttcgggctgaacgcctggtatatcaactccaaccgggaacttccgatgttgacgaccgactatggagatgcaaccgacttcgagaaccgccagcgagaacagacgttccgcagcgtcttgtcctgggatcacatgaaaagcaactggaaactcggcgtgaaaggcggttacatacacacatggatggcctacgactacaagcgtgaggtcgcacctgacaactgggcgtcgatgacccgctcccgcagcaaggtaaacacgttttacggtcaggcggagggagagtattctttggataaaaaatggtttttcaccgccaatgtatcggcacaccagcatttggtacggagcgaggacaagaacatcatcttgcaggacggtggcaaggccatcgtgggctatgacaaggggcgcgtggaactctccggctccgtatccgccaagtggcagccgatagaccgcttgggtatgtcggtggtactgcgggaagagatgtatggttccgattggattccactcattccggctttcttcattgacggtatcatttccccgaaaggaaatgtgatgctgaaagcatccatatcgcgtaactaccgtttcccaactctgaacgacctatactttttgccgggaggtaatcccaacctgaaaaacgaacaaggtttcagttatgatgccggggtgagtttcgatgtcggcaagaaaggcatttacaagttgagcggcggtgcgaactggttcgactcctacatcgacgactggattatctggctgcccaccaccaagggcttcttctcgccccgcaacgtaaagaaggtccacgcctacggcgtcgaggtcaaagcgaacttcgccgtgcagccggcgaaagattggctcatcgacttgaacgggtcctattcgtggacaccctccatcaatgaaggtgagaagatgtcgcctgctgaccagtcagtgggcaagcagttaccctacgtgccgaagcactccgcatcgctgaccggacggttgtcgtggcggacttgggcgttcctttacaaatgggcgttctactcggaacgttacaccatgtcgagcaacgactatacgctgacaggacacctgcccgaatatttcatgagcaatgtctcgttggagaaaaacctgtttttcaaaccggtggacatccagttaaaattcgccgtcaacaacctcttcaacgaggactacctttcggtactctcgcgccccatgcccggcatcaacttcgagttcttcatcggcattaccccgaagttcgggaaaaacaagaaaaagtccgaaaatacaaatatgtaacgatatgaaagcattaaagaatttaagcctgctgttgctacttgtattggcattcacaggctgccacaataaaagttcaaaactcgccgatttcaaccgaacggtctatacacctgaatacgcttcggggtttgacataaaaggtgcagacggcaaaaagagcgtattggttaccgtcacgaacccttggcagggcgccgacagcatcactacgaacctgttcattgcccgtgatgacgaagaggttccggcggatttcaccggtcagatgctcaagggggatgccgagcgcatcgtctgcatgtcctcgacccatatcgccatgctcgacgcaatcggcgaaacgggacgcgtagtcggcgtgtcaggcatcgactacatctccaatcccgacattcaggcacggcgggacagcgttggagatgtgggctacgaagggaacatcaattacgaactgctgctctcgcttgaccccgacctcgtgttgctttacggcgtgaacggggcaagctcgatggagggtaagctcaaagagttggatatcccgttcatgtatgtcggcgattacctcgaagagtctccgctgggcaaagccgaatggctggtggcactttcggaggttatcggaaaacgggcggagggcgaaaaagtattcgcggaaatccccgtcagatacaatgtcctgaaaaagaaagtagcggacaatatcctcgacgctccgtcagtcatgctcaacacgccttacggcgacagctggttcatgccctcgaccgaaagctatgtcgcccggttaatcaaagatgccggaggcgattacatctacaagaagaacacaggaaacgcttccgcgcccatcgacctcgaagaggcgtatctgctggcctcgcaagccgatatgtggctgcatgtggggatggcgaacacgcttgatgaactgaaagccgcatgcccgaagttcatcgacacccgctgtttccgtggtggacaggtctataacaacaacgcccgcaccaatgctgctggcggcaacgactactatgagtcggcggtcgtaaatcccgacctcgtgctgcgagacctcgtgaagatattccaccccgaactggtcgaggaagatttcgtctattacaagcaactgaaatagatgcgctcccgttccgccatattgtttgccatgctggccgccctcacccttttcctgtttctgctggatttggcggtgggggcagtcgccgtaccgctcggcgatgtatgggcggctttgacgggcggcgactgcccgcgggcgacggcgaaaattatactgaatatccgactgattaaggcggtggtcgcgttgctggccggagcagctctgtcggtcagcggtcttcagatgcaaaccctcttccgcaatcctcttgccggcccctacgtgctcggcatcagttcgggcgcgagcctcggcgtggcactcgtcgtgcttgcaggcttcggttcgtcgataggcattgccggggcggcttggctcggagcggcgctcgtgctggtcgtcatcgccgccgtcggccaccgcatcaaggacatcatggtgattctgattctcggcatgatgttctcgtcgggagtcggcgcgattgtacagatattgcaatatctcagcaaggaagaatccctgaaagcctttgtcatttggacgatggggtcgctcggcgacgtgaccttcgaccagcttgcggtactcgtcccgtcgattatcgccggactgttgttggcggtggtgacgatcaagccgctcaacttactgctgttcggcgaggagtatgccgtgacgatggggctgaacatccgacgctcgcgcgggctgctgttcctctccacgacgctgcttgctggtacggtgaccgccttttgcggtccgataggcttcatcggactggccatgccccacgtcacgagaatgctgttccgcaacagcgaccatcgggtactcgtaccgggaaccgttctttcgggtgcggcggtgctgcttctttgcgacctcgtttctaaaatgttcaccctgccgatcaacgccatcaccgcattgctgggaatccccatcgtggtgtgggtggtcttgcgcaataaatccgtcaccgcatgataaagttacacgatttttccataggctacggcgagcgcaccttgctctgcgaggtggaaaccaccatagaaaagggcaggctgactgcccttatcgggcgcaacggcacgggcaaatcgacactgcttcgagccatcgccggactgaaccgccgttataccggccgaatcctgctcgacgggcataacgccgccgatatgcgagcagcagaaatggccagaacgctggcattcgtcacgaccgagcgcacacgcatcgccaatctcaaatgcaaggatgtcgtggctatcggccgcgcaccctataccaactggattggaaagatgcaggaggtcgacaaggagatcgtcatgcggtcgctcgcctcggtgggcatggaggcttatgcggagcgcacgatggacaagatgtcggacggcgagtgccagcgcatcatgatcgcacgggcgttggcgcaggatacgccgattatcctgctcgacgaacccacctcgtttctcgatatgcccaaccgctacgaattgtgtacactgctggcacggctggcgcatgaagaaaacaagtgcatccttttttccacgcacgagctggatatcgccctctcgcttgccgatgcgatagcccttatcgacccaccccagttgtcgtatatgccgaccgaagagatgcgccggagcggctgcatcgagcggctgttccgaaataattgtgtgacgttcgatgccacgacaggattcataaaagtgggacaatgactaaggaatatatcatagagaatttcacagcaaatatcagcgtggacgaatatatttcacgcttccgggacgaaaaacgttttgtcgaattttgcaaacaatgccccaactacggtaatagttggggatgcccgccgttcgatttcgataccggagaatttctgcgccaatatgaatatgcccacctgatggccacgaaaataattccggtcgagaaaaatattccgatagacagaacgcaggaattgattaaaccggaacggctcaggatagaaagggaattgctggaaatggagcacagatacggaggtcgggcattcgcctatgtaggaaaatgcctatactgtcccgattccgaatgcgcccgcaaatgcaaccgtccttgcctgcatccggacaaagtacgtccctcgcttgaagcattcgggttcgatatgacacgaacactctcggaacttttcgggatagagctgctttggggaaaggatggtattctaccggaatatcttgtgattgtaagcggattatttcataattcggcagaaaatattatcagtcatacgaagcgtaatcaggattcaggaaacctataatcttattaccctcattgataacaaaagtccctgcaatccgaattatagattgagggactcgatgaaagtgaatgtaaaaactaaaagaacaactctactttcgtatgcctgttgacttcgaccggtacatggtcggctatgccgcctctgcttaccttgacgatgcgttcgatcggtatgccacgctttttcaattctgcaacgatataatccgctctcgatgtacttaatgaaccattaagcacaggagttccagtcgaactgtcggccgcaccggttactctcaaggataatccgtatttcttggccacgcgagccagttcatcaaggttaagcatttgggaagcatccgtcaggtgcgccgtattgaggttaaaaaagaaatagacaggcgacccgatgcaattcccggcttgtatgagttccgtcctttcagagacgattatgcccggtttctcggcatcatctccgttgttgccatatccaatacttgcagaatcaagcggcgagattccatcccaatgccggtttttcaatcttgcccgtagtgagttcaatccgctgtaattatttctgggataaccttgacggcggtcggtctcatcgtcattaaccagatgaccgtacttgtcaagcaatccttctatttccagaattttcttcaattctgcgagcgtccgtcggttgcggtcgtaccagtctttataacgcttgttttctccggataagatattggcatgatccacgagccactcattctgacgaatgtaagatgtcgcatcaaccgcgcgtttccaaccgacctttccgagatgaaacgtgaaaccggcggtcagcgataccatgtggtcgccgaggcggttcgggcgtccgtaaccatcgaagtcctgaaaggtggtcgtgccggagagttccaacatggcacttactcgtttggaaatccgatattctccctgtacgccatacgaaacagtaaagggattattcccgttagaggcattgtgcaacaggccgacaccggcaaagggagcaagattccagcgtacctgttcttgccgggcatatctgcagccaaggacattccacagcagatccgcatggatatggtggtagtcctgattggacaatgttccatctttgaactgcacaccgctgtaattgatacgtgcgccgacggacggagtgaaccattttccgactgcgaaactgtacgagggtttcaagcgtccgaagaggtcttcgcagccgagaggtgtgccgagaaaggcggacgtacccccggcaatactgacaaaccagttgccagtccgggatgccggaagtaccactccgtcaagatagacgggctgtatcggttgccgttcctccgagacattatagtacggtgtatgttgtacagtatccacctgtacgggttgtacacttgcctgcgcctgcaacgtgcaaagcacggccaatataaaaaagatctgtttcgtcatattccaatgatattattcgttatactttttgatttgtaataaggcgtacgccacttaccgtttgggtttcttgccaatggccgggcgcatcatgcggctcgccatcctcatgcagcggagtgcccatgcacggttgtcctcgtcctcgtcgcgtccccatttcaggtcgctgccgccacctccgccgccacgagtttcggcaaaagtggtggcatcatcgaccataccgagaaacagcatcgtcgcgcagtgcatcacgtctgtaccttgttccgctatggactggacgagcgagccgtcgaacagttgccgttccgccacgtccatctgtgccgatacgttcctatactcgccgaccacattttccagcaggacatccttgagcaacgtgtccactttggaatgtacatcatgggagtatttgtaggcttcctccttgagttccccggtacgttcctcaatggcatccatgttctctttcagctcggcaagctgccggtcagccgtctgtaacttctcctgcttatctgccagttgcctgttgattccggccagttctttttccagacttttcacttgtgcggctaattgttcagcatcacccttgttcgctttcaaatcctgttcggctgccgatagcagggcctctttttcggctttcgacttctcaaggttatcgaccattgtcgtaagccccttgaccctgcgctctgccagacggatgtccgattggaggtcagccagaactttttgatgacggctgatattttcctcgatggtcgtacattcttccgatagcatacggcggtattcttcggtagtcctgtgccgtgcgcctgtttcggatatgcttgttcctctcgacattccccaccttgtattgacttcggtgaaaaagtcggtatgaagctgtttcatccttgcgctgtattcaaacttgtccttaccggcgaatatttccttgtacgcaaagcgaccgtctttgattggcaggagcgtacagtggacgtgcggattcaattcgtcaaggtgtacgatgaatgcggcgatgttctgctcgccatatttgccactcacgaatgaatagacgtctttcgcccagcgttcaatatcgctttctcttttgatatggatattgtccgcatctttctcgaaatccactttctgcgtgccgaatgcgagttcgtgcatccgcttacgggaaccgccgaaaatgaagttcaccaccgtgcggtacttcggttctgccagtccttcgttggggtctttgattccacgcctctccaatatgtccgccatccgttcgggaatgttgcggctcgtgtcgatgggacgtaccttgcctccgggtgcaatctcgaagttcaggtgtttgcgtgtggggtcgtaattccccttattcatagcgtacttttccgccctttcactgcgatcacgcaagtgttcgttactttgggctgtggtgatgcctttcgacaccttcacatcaagtacctgtttttgatctgccatactcttttcgtgttgtttcggacaatccgtcctgtcccagcttgctgcttgcccggacagcctcccgacggtcgatagacggtcggggtattaggctcccccttccctttgtttcgtggcagacgggcaagcccgtgtgcctcctataaccggcaggatgaccgttaagggatggaggcggattgttcgcgttatacaatctgttttcgactcccggttcaatccaccatcgcctgtgccttcgccagaagcgataaaaagggtttgcgaagcgatttgaggcgttcttggtcttcgtccatgtcgaagtccgtcactgatgcctcggtgtcgagaatcagcccggcgaggtctttggcggactcgatgaaagctgcccattcttcgccgaggtcaagccggaagaaatccacaagcggcgaactgtcatcgaatctcgacttgtgcaggattttttgcagggcggcgtgggcgatgcagcacagggctgtttcacgatgttccgtgaccaaagtgccggaatgtgcggaggtcgtgatggaatgggtgtccgaacagtgtccggcgtcacggtcggcaatttcagcctttgccagacttacgagttgtccacacattacgccagtttcggcagcggtcgttttgccgattacccaatcggacaatacctcacggagctgtccggcaaagtccggctgctcctgtgcatcgcggggctgtgctgcctgaccggattgtacggtcatggtaatgaccacgcttttgggaagctggatgcgggtcagcaagccgaatgcctccattgcactcaaaaaagaacggacggtagccctgtgccaatgccactccgatgcgaggtcggaaacggtcaggtagcactggttgggttgcagcacgtagtccttctttcttaaaaacggggaaacgaaacctgccagtgatttgtccaacaggtcacagtacgcttcggtgcgtgtcttgcgttcatcccctttctccttgagatattcgaatacctccctgtctgccaatatggaaacaggtatcttttggttatttttcattttcattcggttttaatgattcatattgtgcggatatgtcagtgttgccgctgtccgcttcatgcggcagatttgcgtgatgattgtcgtgataggattctgacagcattccgggatgctttgcccatccggaaagtgtccccgtgtccttgcattcggacatgacccgaacggagggatagaacagggctgccagaagaagataggtaatggttatcgccaaggtgtacagatgcggcacaaagccgatgaccagtgcgaccgatgcgagtgtgacaaatgcaccggggcggtcaagcaacctgcgtaaccagttgtccgtccatcggaacgagaacattgcggcacagacaccggtagagagtaggattccaaactcacccatatgtccacaggcatatacataatggaaaagaagcaggcatatcagccatacttgcacatacagtttacgggcgttgccgcttcgtgccattgccatgtaaaagggtgtcatgaaccgcttgttgttcttgtacaatgacattgataccccgaaaggtatcgcgcagaaaatgagtagcaggatattcagtaacataagtaatagggcttttcgggtatgggagtggggcgcacaatgagttccaactggacaataccgtatgtcgccagtcggataagggtttcggcatccttgggcgaaaagtacatggccgctttcttgatgcgctgcttgaatgtactgtcttgctttcggtagatggccaaagccttgtccagttcgtgttcgggaatagtccatgtcgtaccctcggcgtgtatgccgttcgtcttgaaggcacgcagcaccaatgtacgggaaacgaggtaatcggtgcggtcggttcttgagatgatatgctccttgtagagattgtcatcggcaacctctatccacgtccggtaggtgttgatgcaatagaccatctgtcggtataaactttctctcatatgaaattcatcagcacgtcggacttgtctttcttgtatttcaggaacccgcttttggagtgaagttccaaatcgaggcataggtccccgtacatctgctccaaagaatcatagatggtaacaaggatgctgtttacattaccctccgtatcagtcttggcgttcatcttgaacatctgtccgaaagcgggattcgagtatgcacaagtgctatgaccgaatttttccgtccgcatcgggatatggtggtaaagcgtgatcaactccatgtcgtcctcgaacatatccattacttcgtccagttcgtaaggggtgcgcaacggaaacgtaagcagcacatagtcgccgtagaactgcggttcttccatcgtcgtcacatcgagcaactgcggaagttgcagggggacgaatgccatgaagtcattataaaaatgtcgtaacatattcatatatttttctgttgtcatattttacagcgtgtgtatgaatgcttccatcagcattccgggcagctcgtccaagcggttgtctcctgggtgcagcatcctgcccaactctctgaaagcgtcgggtgtctgcgaggcaagcatatcgagttgctctctttcttcggctgaaagcaacgccaagcagaaaccgtccaacgacgaataaggctggagaagcatccagatgtaggcttgtgcctgtgccggtgtcttgactttttgattgcagatgtcgtcgatacaggttcggacattctgaatcagcctgcggttggtgcgcatggccaaataaatcatggcattgcgataggtgatgtcgttccgttcggcggcaagaaatacctgtgcgcagcatcgttccgtgtcatgcgtgatgtcggaaagattctcgccgtcgaaatcaggcagacgtgaaaggaatgcccggtacacagcatcctccttttcgataaaggtcgtcaggtctgccatacaatgaataccgtaatcaatcgtttcagcaagggtagctcgataagtggcaagaatatgttgtcggtttctctgactgacgggctggttatccaatgaggcaaagaacggccggattgtttcagccacacgatgcaactctttgtcttcaagatgcggcgagatttgttcttttacccacagtatatccttataagtgcgtgtttgagacagcaccatccgtgaaaattccatgcggatggaatcatgtatctgttcacactcttctcttacagtggaatgaagccggccaagcgtatcacattcgagatacaggaatacggaatccctcaatgtttgccattgcttgaggtgtccggtcaattctttaatggagagtcttttctgcctgcgtatgtcagacaggtattccctgtatgttccggcagggtcattcttggctttcgccaatcgtttgccattgccgttgtcgcatgacgcgcataggaatacggcaatcgaaacggcaattattttggcaaagattatcggctgttttaagttcgattttgatgttttcatactatattatttcgtactatttagtgcaaaactatatattatttttgatacttcgcatccgaaaaaccgtattttgcgcattttttaatatcgtacttaatagtatgattaccaatgaaaacaagtgaagataaaaacatgaaaaatgtacgattttcgttttttaatatagtatgattcagatactcgaataaaacttgtatatttgcacttgttatcatgaatattgtatattgatatggcaaaagtcggttatatattcgaggcgaattcctacgatgcgtttgatgcggataaggaatggatgcgccagtacgggtgtgtacaagtggttgaagaatcggtcggacacgagacgctcagaccgagatggaaacaactgatgtcgaatcttgaaagaggcgacgaattggtggtgtcaaaattcagcaatgccgtgcgtggtttacgggaactatcggcattgatcgagctatgccgcatcaaggtcgtgcgtattatctccattcacgataaaattgacaccgacaacaaattgtttccggacacgacaccggcggaagtattggccatgttcggggcattaccggaggaagtggctgttttgcggaagtcgtcagataagattatacgcctgcagcagagtatcagtattccgattaccaaaaaaagtatgagtaaaactgaacgggacaaaaaaatcgtggatatgtataacaatgggtattcaatccgtgatatttggaaagagagcggtgtccggagtaaaagcaccgtgtacagcattctcaataaatacaaggttcagcttaaccgaacaccgggacgcgtgccgggcatccggaaatagaacttataaatcaaatatggatattgaaaatcagtagattacttgcgtaattcattattttttcgtatctttaagttggatataactataaaaaataagacctatgggagatattataattttattgttggtatttttggtagtgggcaggctcttgaggggcgtcttcggcggattcagtaaaagcagttttcgggatgacaaataagtttggattgttataacaggcggatatttgttaattttgcaccgtattcattaaaatcaagaacaatatgacaaaagcggaaattgtcgctcagatctcacggcagagcggaattgagaaaacggttgtgatgactgtggtggaatcattcatggaaaatgtaaaagagtcgatggttgcgggaaacgaggtgttcttgcgcggcttcggcagctttgttataaaacggagagctgaaaagacggcccggaacatttcgaagaatacgacaattaaaattcccgctcacaacatccctgcattcaaacctgccaaagcatttctgaatgcggtaaaagagaacaagtagagtataaaagtacagatggtgcaacaacaccgtaatgagtaaaacaaaagcgacccaaaggccgcttttgtcgtgataaggcaaggattatttcttgccttttttcgctggtttggccggcttttcaggagtctcctccttctcgacgggcggatagaacttgacggcgactatcacgatacggttgtgtttcacaccgctttggtcgctccattcttcgggcttgaaatacccctcgacggtcagcatcgtacccttggtcagttggtcgaacgacccggtgttctcgtttttacgccacgcctcaaaattcataaaggcggaaacgcgtttggattcctcgccattattctccagtcggcttactgccagagggaaacgtgctacacttgcgttggtgaactgacggatttctgcatcctttcctacgaaaccggttactacgaaattgttttcaatctttttcataatgaattgtttttagaagttattaaatcaattttacgctgcctcaaaaagtaggtgcagttaagggaatgcaccaaggccggacgcatcaatactctttatttttgtccgtaggcaaaaccagaaggctcgataaaggaagattgtacggctgtgccattggtcaagacttccaaagtcgttcccgtctgcatactatctttgcatcggaaaatgatgatgacttcggcggaaaactattctgaaaatgagcggaaagccgtagttgcaggggaagtgaaagagcaatccgtccaccggcacaatggtgcgcgtttcggctgtaagtccgcagaatcggcagggattttcgtgtaattcggtcggactgaatagaggtggctacaaacagaacactgaactgacaacaggtggcgataccgcagaagggaatatcaacgaagtggcgacaaaaggcggaacggggtatcggggtgctgccatgttcccgtccggcagaaagaataggggacaaaagggaaaaaggaaagaaccctgcttttcggaaaagcggacggcagcttttcacgaatggctggtttttacaaaaggatatggcgcagccaaaagagagagatagatgtaaaaaagggaatgcggcgtggcaggaatggaagattatcccgttcctgcctgtatcatcaaaattctgccatgattacccgatgctcgaaaatctttttttgattactgggacgtctttggcagacccataggtgatgcttgccatagccgaagacgaaataatcatcaagacgtgttttttcttgtaggcgttccatgccggtacgcagttccgtttcatcggttgagaaaagaatcgtgttgatgatacggaagtagagttctgttacctcgtcacaataaggacaaaagctatgctcaatcgttgctttcatgtttctttgattttaattatacttctactacgtcttctattcgaccatacaagacagagcgcaacgcagtcttgtcaatggcgcaatactcggtgatatgtccgtgctgtttcacgaaatatcgtttgagaacatcggagaaatcaaagaagtagcccatcaatgcgatacctcttttgaaatggatgcactctttcacgtttcgggtaatccagttcttgtcttcacggctcaacttgtctccgttatcaagttgttcccgtaactggtaaaccctgcagcctttcagcttttctaattcgggtacgtcccattggacgaatttcattgctacctgttgcatcgctcttggatttaatcgtaaataatcacttcatcacggtactcgaccacctctttgccactgctaagacgtaccactattttattgccgaagtcgccgacaactgttccctcggagtagcctttatagggggtaagcagggtgcagtgcgcacctataatttcgctatctttttcgtattcgtacatagtcttgtcattttagggttacaacttgatatcccatttaccctgtgagaagattctgaagctcacgtattcgtctgcaaattcgtaggacagaattttgatataagttttgtctttggcttccaacgaagctatcagcctgtcgatttcttcttccggataaacccaacgagaggtaaactccgcatccacgctatcgctgtgtctattgacaaagccgtcaaaagtgtcatccaagaatgcctctatcttgtcgaggtctgctttgttttccgtccttgcgtagaaaatgtttgttgcatagtttgccataatcctaagttttaagttttttattttccctcttttagcatttcagctactttcgggcttgattgaaaattatgtcgcctcaaaaggtgttatggctctttatgcagggtttcacgaccaaatacgacctctgcaaagcggagcgtggagattttgtcgggaaccgtcaggctgtgaccttgaatacaagaaagacatgacaagtacctttgcgacacaattctcatcaggcagaccgaaagttgggatgcgaggataaaatgcctatggcagaagttacgataaaaggaacttccgtaaaattgggatgcagcgaaaaaagaaaatatcggtgcgattatcttctcttttgactgtgaatataaaagtaagggggagaacttcggtaaaggtttagtttagtctattagcttatatatatgctaaactaaagtaaactaaatataggcagatatattggactgcctgtataggtgttttgagggaaatggttacctttgcaaaaaacaatgttccttgaaagaaacagagatttgtccttttttcttttggctgtggttattcatccatagatgactgcaacaatcactcttggcgagaggatgaaaatcgtgtgaaatgacttggaaaaatactcaaagtacgaacaagtgaagagaaagaaaggtagtgcaaataaaaaaacaagaaaatatgataattcgtgtttctgttcctaatttgttccttgataaaaacacatcacaatataaattgttaatttataagatattaagatgtgaaattttgagatataactaaattttccagatttctctacgagaataagctacactttccgtgtattcaatatgttactgcaaaagtagcatattcagcggaaattgcaaaacatcctgccctttcgggtgctgttgctgtgattaattgtgcaaagttcttgaaaacaaagtttctatccaatagtcgggagtatggaatcgaaactttgttagttgtaagttggatcgcgggcattgccgattgcttcggcttcacgctcgaagaggtcatgcagcagaacctcgacaaactcgccagccgccgcgagcgcggcgtgatcgacggaaacggggataaccgataaatagcaggctgagaatgaaagtagttgatttattcaatcaagaagagcatatattcacgaatcgcaagaagcggcaaaaagggcttttcgacgattacgatggatttgttgagaaattcaagcccaagaaaacgaccgacgactgctatacacctccagcggtgtacgactatgttttgcaatatgtagccgatcattgcgacatcgacgggatgaccgttgtccgcccgttctatccgggtggtgattacgagagcttggtctatcccgataattgcgtggtgatcgacaacccgcccttttcgatcgtctctcaaattgtccggttctatctgaaacgagggatcaagtttttcctgtttgccccgcatctgacattgttcggcgctgaccttgactgtacacggatcgtatgcggcgccgatatcgtttacgaaaacggggcaaaagtaaagacatcttttttgtccaatatgttcggcgagtccggcgtaataggtgatcctgtgctatataaggggatcgacgccatttgctcggcaccgaaagcggagttgccgaaatacaaatacccggactgcgtgctgacggtttcggatgtagcgtacatcgtgaaaaacaagggtgagataaggatagacaagcgggaaatgctgcaccgctctgcactcgatgatcaaaaaaagcacgggaaatcgatttacggttccggttttttaatctcacataccgccgccgaaagagttgccgccgaaagagctgcggtgaagaaagagactatagtatgggagttatccgaacgagagatgcggatcgttgaaaaattaggacaataaccgatgatcgcttatgacccacgcctctcttttcagcgggatcggagggcacgatttggttgcggatttgcccccggaattttacgcctgggagaaccgggacaactttgcggaatgcggggccgacctcctcaccctgtggtgcggcgacaagtggaaaaacctgcgcgagttcgggccaggcgaccctttcgatttccgcgccgttcccgtggaataccggccgttcgagaaaaaatggctgtactacacgggcaagagccggggacttatgggaagcccgcgctacgatgtgatgaagcaccttctgccgtggtggtggcacttctccacgccgaacctcctgaaaatcgtgccggagatggacgaaggtacgctccgttccgaatccgaaacggcggaggaggatttgcaactcctgccactcaacatgaaatggatcgccacttacaattacgcccgcgtgctcgatctggaaaggcaggcaagggcggcggggacacgccagctaaagtcggtacaactgacgattttttgaaacgataaatgaatacgagaagatatgaaaaccaaactactgcgccgactgaggcgggaggggcgttgtcagatacgtgtctattcagttcgtaaggatatggatgggacggttgttggcatacgctacgggtataattcggatgaatatgcgcatctatggcattttgcgatgacttcggatgaacttaaatcagaagcaatgaagatatatatcctccgccgcattgcggagctaaaaggaaagagaaaatgaaaaaagtaatgttcaacgatcgctacggcttgacgctcgaagaggtcatgcagcagaacctcgacaaactcgccagccgccgcgagcgcggcgtgatcgacggaaacggcgataaccgatgatcgcttatgacccacgcctctcttttcagcgggatcggcgggttcgacctcgccgccgagtgggctggctggacgaacgctttcaactgcgagatcgatcctttttgccgcaaagtattgaaatatcacttcccgaatgcagaacaatatgaagacatcagaacgaccgacttcactgtctggaaagaccgtatcgacgtgcttaccggtggattcccgtgccagccgttcagcctcgcaggaaagcggcgaggtacagaggactaccgctacctgtggcccgcgatgctcgacgttattcggactgttcgaccgcgctgggtcgttggcgagaacgtttacggaatcgttaattggtcggaagggatggtcttcgaacaggtgtgcgctgacctggaggcggcaggatacgaggtgcagccgtacattataccggcttgcggtgtcggcgctccccaccgtcgggacagatgctggtttgttgcccaccgtgcagacgcagggtctgaaacgatgcgtgaacggtcgaacggagttcatgccgacagtattgcttccgacaccccatgcctcggacgcatcacgcggaggtcaaaaagtaaccggactatacaaaacgagaaaatcgggtctaacatatatgtccctgttgaacgatctggcagtaagcggacttttaccgaccccgacagcgaacgatgcgaagaatgtaacgcttcctgccagtcagggcatatgcaacggactacccaaaacagcgatgcaaagcgacgaataccggactggaacgggttcccgactcaaccccctgtatgtggcggagatgatgggtttcccggtgaattggctggtatcgcctttcctcggtggcgccgggaagccgtcaaagcctgcggaaacgccatagtcccgcaggtggcattgcggatttttgaaacgataaacgaatacgaaaggaaatgaaaaaacacttacttacaagttttcttattggaacactgacaattgttttatgtggtattatatccggggaaccctatcgctcgattgcatggggcgtaatattggttattcttactatctccgtcattgcaattgggatagcgacaaccgcaatctacgatttgttgaagcaggggatgaatatcaacatgctgactatcaatggcggaatccgctttttcgacaaaagcaaggccgacaaccccgaatttctgaaaggaggcgagcaatgaataggactatgaaacaatggcttttgccccttatctgccgctggttcgggcataaggatttcgaggaggtatattgcgtcaaatcgccccgaaattggttctgccgccaaaacaaacccaaccgatacgacgtggtgcatgatattgtttgctcccgatgctggcgggtacatcgaactatcctcaaatcccgaattagccgcgcacaactcctgcatgacggttggtttataatcgacgaatagccatgaaaagcaaaaaagcaaaggaatttatcgacggatgcttgaatcatcttgtaatagagatgagcgaccacgccaaatggcagctacgagcagcaatgagccatacagccgaactcgccgagcaggaggccgaggaaaggatgcgggataaagcgatcgaagcattttgcaaggattgcccaatttactcaatacaaacaagtaatgggggaaattgccccgattgcagtgcattaaacgcattcaaacaaagactgaacgaggaatgaaattcacaacccattgctttgtccgcgtcgaggatgcggagaagcgaaaagatgtgatcgagtggtgtatgcatattggctatgaatatatttatcccccacaagaagagagattaggcgataaggtaatatgtgacacttattgtgtcggcgtggctcatgacgcacaaacattcaccgccttgaattgcatagactgcggcaccaacatcgagctgttcagggcgctggcggcgatgaacaacgagaacgatcaggagcaatggtactcatatacggaatatccgactaatgagagtaaaaatggggttagacggcttatttttaacgaacatacgcgattcgattcttttgtagatgtaccatcaggttattaccgcaaggctacagtcgaggagatcgtcgaatatttcaaaaacaatgagaaatgaaaacaattgaggaaagaatacaagaatatgtggccaatgcctgggtcgaacttgatcaattcaatgaagaccatgtaacttttgaaaatatcgttacatccgcctgtgttgttggcgctaatttcgaatatgaggaattgacccgctggcgtgatccgaaagaggagctgccgcaaaatggacaactcgtgttgtgtaaaacctctgataagaaacttccatttgtcactgttaaatatgaccgttctgaatggtggatatatgtgtatcccggatgggctggtattggtcataagattatcggctggcggccgattcacgaaaatgagtaagatgctctgtgcattttgactaaccaagtaactaaccaagaatatctatgaacacgaaattcaaatcagactacgaaaaagcctgcaacgcctatttgcaggctttttgcgagaaacacggctatgattatgaggatgctacgcggagctgggtcggcggcgatgtcggcgggatcaccgaatgcgcggactatatagttgggatggatgacatcatcaccgacatagaccgggacgctccggaagatgagtttgtaaagtattacgattactgtctgcgggtggggagtatcgcctgcggcaaaattagtacgcccaattacagcagctggctctcggggtgtccacgcatgagtgaagaacagatcacccggctggaggagttgcagagggacatacgcaaggcggaaagagagctggaagaacaaataaggaaagagaagttttaaccgggagaggcaaaatcgctcccttttttattcatatggcagtagatacatctaaaaacggtacagtagatcgtgctaaacttctggcaatagaaaataaatgtacgagaataattcgaattgcgggggtaacgttttatgttgctccggataaggatacaccagaacaccggaggcacttaatccgcgttttggagagttgcggtcggcgatatactcaaaaagcaggtagctatgaatcggagatttgaggtgagaatcgacattccgaatagttgtgaattgattggatgcagatcggacggaaacatggcaattattgttttcgaagattgcagcggcccagagatccggccaatcggtttttgtcgggaacattccggagaagtaccggacgccttcgaagatgaataaaaaagaggcaattccgaagaatcacccctcacaccgatacaaatataatgatttattcggaatttgcaaataggacgatataggaaaaacgaacgcagaggcggggcacgtgacgattccgaaatatacatcagttattcacggaatcgattgctcgaaatgattatctgccgggaagcaaggatgggcgtgagttatcgccatgatttcgtctatcgattcaaggcacacaaatccttgccgtttttatggcggaaattcaaaaggaatattagagaacacattgacggatggcagcaggagctgcctttattttgatgaatttgcggaaagggagaggataataaccgtgcaattcggaatatatgatgtagaattacatccgttcatcctattgcataattgcaattagacgataaaagtgttcttttgattcattctgttaatgtcgtttcaagcattgaactctattgggcgggagccggacgtgaagctactttataacgtatctttcggggcacacgaaggaagtgcgcctttcgcacgttgtcgggacattgatgaagatataaaagccgatcttatccagctattatatcgattctatcaattcgcagattacggctacataaatagggtagcagcattcgctgatctccaacaatgacatcagatatttagtttgttcgtccataaccgtcgcatttacctttgcaacaaataaattggtgaatatctttccaaagcattgtatttatctgtcctgtcagataggctacttcttcgccttgcatcggcattgcggatgctacggcgatgtcgtcgcacaggtgccgcagttcatgctcgaaagagttcaggaattgtgcctgggatgacgccaatcctacgactacgacagaccttcgccgggtcttgttggaataggtgaatcccgaatccatatcggccttttccaaattttcccgtactcgctccataattggcctgggacactctatctgttccaaagaaaaaaggatagagcgcgtgtgatagccatgtacggcgaagtaaaaccgcacatgccaatcatagttctctatcctcagatcccgcagcttcatgtcgttgaatacactttttgaatcctcacatacggtctttcgagccgcgttctggatttgattctgttacaggacatcttcccacggaacatttgttcccgaccctatcagatcggcgaaatatcgtgtgaagggcagcccgggataggcgtcttcatcgtcgatgaaatccttgacgaacagggccaggtgttgttcatcggcaatggatgatccccagtaatcggcccgggccatattcgcgacatatacacagtcgtagccgttgtcgtgcttgagctcgataccgttcgtcttgagcaatttgtcgatctgctctttggtgatgggttctattttcttcccgtcgcggtccttcatgcggctgacggcaaattcacacattttcttcgaaaaggaccatccgtttttttcgaggtatgcgcgaatatctgccggcatggagtcccttgcgtccaatctttctctgtccataggtttcgctgttaaagagaggggatttctcccctctccggattcgttttaccggcggaatctggagtagggtccggttccccggacacctcttcgttcgccatatccgtcgctgccgtattctccgccacgctcaccgtagccgtcgggcatgtagcctcccgtgtgacgctccccgtagccgtcgcgcatttcgcgtttggcatcctcgtagccacactcgtaggcttcgcgcatcttgcgttcgatttcttcacgctcgccgtacccgtcaccgcggtaccggccttcgatttcccacattctcatgatttgcttgttttagcagacatttgcgatttaagaaaggcgtccagcgatgacttcatggaggcgaactccgtttgcatctgacgaagttgtcccacctctgcccgcagctcctggagctccttgtcgcgttgcgcctgacccgcgtacgcgggattcacttcgcgcatgatctgatcgaaaacttccagattggccttgtgtttttcgtaggaatccacaacggactggctctgctgctttgccgcattgatggcgtctatgagccgttcgcgggatgtcgtgaccgtgagtccgtcctttgtcaccatatcggcatttaccgggacgacccatttctggtcccctaccgggaagctgacggaaggctgcgccgggggaaagttcccgggagcggggaaatagggctgtggcgcctcttcaagcgtcgccatgtagtatttgggagttccgcgcatatcgagtacatataccggagcgcctttggttaaattcgcaaacatcttcggttaattgttttttgaaagctccggaggggcggtttcccctcctgaagccttcggtttattattggttaaacggcccctgtcatcagttgcagggtgtcggtctgtttgtcgtagaagagctggaatacacccgtccccggaatatcggacacggtgacattggctccgttgtacgtggtcacattcttggtcacgccgttggtttcgaacaacacgggaagcgtgcctgtcgtgcctgcgggtattgcctgcgacagctcgaccaggactatccccctgtaccaggaattggcaaaggcgtggttttggaatgagaacacgacatcggcggcattgaccgtcacacccgtagttttgatgaccgggatacctctgcgattgacatactgaaatgggaatactgccatagcatacctcctttccgtattaaccccagaatccgccgttgccgccgagtccgaacgcggcaccgaagcccagcccgtattgggcggctacgcaggcgggcatcgcgtacacctgcggattgggaaccacggtcgtaggcggcaggccgcactcgatctttgccagccggttgctcagatcgccgatcgcagcgttgatgggcgctacggcctgggcctgcgactgcatgatcgtcgccgtctgatgttcttgggagagctgcccggccaatgccgcgctcttggcacgctcggcgtcgagtttgttctgcatctcacgcatctcgagggcacagaaacggtcgttgatgacctgcgtctgggcatcgatcttcgagccgagggcattgaactgcgtgttggcgttgctcgtcagggtgttggtctgattgagcgttgcgagctggctttcgtagccctggcgctcgatggcggtgcggacatcgcagcagcaggaggccatctgcgaaagcacctgtgcgttgccggactgcacggcattgatgatctgctgcgccgagaggcccgactgtgcctggatgttgcacagagcggtctgaatctgctgtacggaacagttgagcgaagatgcgagctggttgatggcggtgccgtttccctgaatggcattcatcagcagctgacgccctgcgtcgccgttcagctcggcgggaagattcgagagtccgtttccgcgaccgccgaagccaccccatccgttgccgccccagagagcccagagcaggatcatccacatccactcccagccgtagccattgccgtagccgttattgcggttgtttccgttcatcaacgcggccacgaggttgccgtccattgcgccaccgttgtcgaacactaaagttttttcgttcattgttttagacttttacattgttgcgtccgttcggcggacgctgccgttgagctcacaatgcaaaaatcgacatgaacgatgggagaatcaatcgtatcagtcgcaggtgggacggagtttggacgcaatacggacgaggagcatttcgaacattttaccgctttgtttgcgacgaagatcgaattgggaaatcatcttctctatgggccgtcgtgagaagttcatcagcgaggatatgaccggggcgtgaaatccctgcctccagaggaaatagaccagtaaatacctggcatccacgatctcggcgtttttggctttggatagtattcgctcttccgaaatctccgtttcttgcgataccgtgccgagaatttgtcggtaaagttcagatttgcacatataggatatttctcttacctttgttcactctcttaccaaataaaaataagtgccaacacacttgcaaaggctttacagcccctgtcgtggtgtgttggcacctttattattagcggaaggtaagagagacgctaataaaggcaggggctttttttacgcccacccctgacgggcgaaagctgttagaacagatactttttcaatgtcggccaaagcaggtagaagtagattgccccgacgggaatcaacccggttgcgaacaagttgctgctttcgacctggcaatagtagagtgttcctatcccacccacaatacaaacgaatgagaagaaggcaaggaaaagcagtccgatttttttaattgtttccataattataattcgttaaaaagttatttccgccataaatccatacttatgcttccttgaacataggggccgttatcgcgtgggtcccagccgagggatgccgtgatattgaaccttccgatgtttctgtgaagttgccctccgatccatacgccacccgtgcgattaacgtaatagacgcctgcggcaggcccgagttgccatcggtagggcgttcggattattttctgctgcgtgatagtacgtccgtatgtttcgatgtgttcaagggtagggtggcagtcgcccagggctattccgctcactatggcgaagtagctgctgtcgcgatattcccggcgttcgaatggcagctgtaccggcacactgtcccggttgggatttattgttacggtggtaaaggtggtatccgctggggcgaacaaccatttcggcacctctaccgaaatagccgaggacagtattttatgcggttgcggtctttcgaagtaggccgtatcgattcgagtatgctcgatgatacggacatcgacggatcgcctgccgagccaccatccgacaaggaacaagccggtcagaaggagaatcaggattattttccgcagtaccataatgagtacgagctatcaaccgttgatgaacaggtcccagccggccatcacgtccgtcatgcaggcatcaacgccattttctacgcgcgacatagctgcgactatcgggatcatcacatcgcggttggttgccgtgatccgtccgttttccgggacgccggacaattcggataccgtacggatatatgcttccgtgtcattctcgctcgggggtgcccagcgtgaaatcgtcttccgaatggtgtcgagcccgtatttacggctgtaagtgttcaggcatttgaacatcgcgcggtatccccacgccatagattcgaactgcttgaacgcagcgtcgcgggaaggttccacctctcccttccaatgggttccgtccttgcggatattcccgggattgttgttacgaagtcctctggtcatttttttgtgctgtttaatatgttttctacatcttcaggatttacattgagcttgcgggctatttctccggtcaatgcttttcgaaacagacgtaagaatggaaagttcggactgatgattaaagcgttgccacagctcgaccatgcttctgccaggcaaatggcagaacccaggatcacggtcgtaatcttcgtttcgatacctcctgtcgtaacgaatttatcgatgaaaacgaatactacgatcagattgaagtaaactgccagcttgaatatcgtagcccgcaggagttctgacaggataaattctccgcgctttcgagcgacgcatattccaaacaaagcgtcgaaggctacggcaataagcaccccataaagtacgagctgatacccagcgaagaaattcacgataacgatcaatagtcctataagccatccttgcacggtcataagtgcttcggacagctttgtagcaataccttccaacacctttttcgttttattaaatattttgtccatagttattatgttcacgctatgggaatgtactaccgttggtatttctcaaatctttgtccatgtcgtatggtcggtatctttcttatatacatatccgttttgaatacataatccggcttttccgatcaggacttcgaaaatatcgccggtgaatatcgcgtagttgctcgatcctttcacaacggctactccgttgggtgcaatcaggttcttgcggatgtcggtcacgaaagaaaattgtgcaaagttcttgaaaacaaagtttctatccaatagtcgggagtatggaatcgaaactttgttagttgtaagttgggttaatcgttcccgcagatttcttgtattacgccgtccatgtaaatagcctgcccgcttgtcagccgtccccaccaacgacaccctaattcgtcgatgatgatttcgccctgctctttcagtcgttcggccagccacggagtaacaagccaccattccaacacctcgtccccattaaagggatagaggtattcctcgtcgattttccccgcttggatcagctcttcgataaccgtgctttgtccccataaaacatggatgtccgtaatccgtttagctctctcttgtgtttcgtacatagcggttaagtttttgtttatcgcttatcagtagtaatccaacttcatgtaatatcaataatcttatgctgttagatggtttcgggcataaatagggggtggtctgttttatgtggaatcctattaatggaatagataaaaattcggttttccatccgaaaatggggaggggtgaaaaatagggattgtccgctcggtcggggtatcaaagcaaaacgccccgactataaaatcggagcgtctgaacgaaagtatattatgtgagtagaaaagattgtgaatgtagcttgtttgcctttatcgggtcttgggtgcataacactttaacgaaataagccagcgacacggattcgggaatcatcttgcaccgttcattaagggcataagtaaccgacagcggattatcggccgacagattcgtaatgttgtatttagtaagaatccgattcattgcccgttcatttcattgtggcggattcgttccctttgtcatgcagaatcggcatatttcattatagacggcgtgtgccgtgtctttctgcggcgggtttataaagcaatcatccgttatttcgtagccgttcggcagggccttaatcagacctaatccgttactctctttaataagagcggaaaccgtattacgattcattccgacagcatcggcaatctgtccgatatttcaaaggaggatagaattcgtattattaagacatatagcctttaataagagcagaaagcccgcaattttcggcgggtggctctttgtaaagaatcggttatccacgaaatagaaatccgtttggggattggctatataataggaattacggcgtttgcatccgtcgattatgcgggttgtaacctgcattgctccgcactcctttaatcgttggacagaccgtttgacggtacggatatttactcccgttatttgggacagcctttcttccgttatatggcttgtctgtgtcttgtagtccgatttgcatttaatcgttgctcaaacgtaaatgtcggtcggtttgccgttgcccgtctgaagctggcaaattgattttggaatcgttgtataattcatcgttagcgacgtaattagtaaatagtatttcttttgtttttaataatttccgaaagcaggcggagcctaatgcggctttggcggcttttcggttgtcgaatcatttgttttgcgttacatagtacagcatagtctgaaaatcgggtttgaggctcttcagagccgagagcctaaattaggtgttggttgggtaggtagtggtataagtgccacttttgagcacgaagcaggggacagatttaggcatcgcccttatccctcttgctggcttctgtaaaggtacagaggttattttcagcaaacaaatgaatcggggaattctttatcgggagccgaaatgagggcttttcagcgaaattcgctaaatttggaaataaaataatttggattatgagtattagaaccgacgatttaggatttgtcttttatgaagccgacgaacaagaagaaaaagagttggaatatgtatatgcgattaccgattcttggaattatatgggtgatgaagtcatagacactttcccacgcagattttgggatagggtctgtcaggagaagataaaagccccgtttacaaaagaaatgtttttgcaggaaacggatattatagcgacaattaaaggcttcggattggacgtaaataaattttggtgggctgtgctgtttgtttacgattggtcgattgaaaagtttaccaaatgtttttgggttaaactcccgccaaaatcattaaccaaaatattggactatatcggagattcaaaagattttgagattacattccgcgtaaagggtaaaaagagccgcgaagcagacccaaatgtaaaagcagcagttatgtatggattaaggcaaaaactcaaagagtggaaagacaaggagttttaccgcataatagatcattctacctacacaacgacattcacaaattcatcctattatatgtgctttgcggcggataagttcaaacatctgttcgatgctttgaaattgccgaatcgaggtgcggcgaatgaacacagatgcgataaagaggtatcttataataaaatgttgcttatttcccgtctgttctattttatgcggctgacacgaaatgtaaactttaaggatagcgatgaatcgctgaaaggagtgctgaaaacctatgcaaacaagctgccgcatactgaatccgctatctatggattttagggagtaggaaatgggctgttttttactccctgcaaagggtcgctgacaatagtatttttgcagtgtcgaatgggataaacccgacgacctgcaaacgcttgggcaagggatgcagcataatttagggatagtcatttaattccttcaatttgaattaaccagcagactttcccttatttttccgatcatactcatcgtttttgataggtctgttgaactctaacctaatctcttgccatagagatatttattgtgtagcctatatgggcgcatcgaagtcgtgccagaggttcttgtcgtaactgacactgaagctgggagtacgttcctcacgcagcagcgagaggtacatgccccggttgccgcgttctcaccggggtttgattccccgtaccgcgaggtaagcccgaatactaatgcgtcgtcttatttcttcgtaattcatggtgtcggatttttttgtggttgttttattattttgcctcattagtatccactaaaaaatcgctatagtttttttgaaatgattgatatttaatttgttacaagagattttcttgcaaacggacttgaatttacttttgcagtctacatcagactgttatgtttaaagacaaatacgtttttgctcaattagttcaatttcttgaccgcaacaagttcaatcgtttatctgctaagtatcagggagacagatacgtaaagtcattcacctgctggaatcagttacttgtaatgatgttcggacaactctcaaaaagcgaaagcttacgcgaccttatcattgctcttgaagttcattggagcaaattataccacttgggtatgggcaagtccgttacccgaagcaatcttgctaaagcgaatgagggtcgtgactatcggatttttgaagaatacgcctatcatttggtggcggcggcacgttccaagagtaccgagaagatgttcggatttaccggtcatgtatatgcctttgactccacaacgatagatttatgtcttgaagtattccaatgggcaaagtttcgtaagcataagggcggaatcaaagtacatacgctgtatgatattgaatcccaagtcccagctttctttcatatcacggtggcggcaaccagtgatataaaggtaatgcctgagataccatacgaaaaggggcgtattacatcttcgaccgtgggtacaacgacttcgccaatctctacaagatagagcagatagaagcaacgtttgtaatacgtgcgaagaagaacttgaagttcaaacaaatctcatggaaacggaggcttccaaagaatgttttatccgactctaccattgagtttgtcgtctataagagtagtaaagattacccagctacactcagaagagtggtttatcttgatgaggaacaaggtcgtgaattcatgttcttgacaaacaactttgaacttcctgcatcggtcattgcagaactttaccacaatcgttggaatattgaactcttttttaaatggttgaagcaacatctaaaaatcaagaagttctggggtacgagtgaaaatgctgtcagaatacaaatctactgtgccgtaattacttactgtctaattatatgtgtaaagcacaatatgaaattggaacggtcggtttatgaaatcctccaaattgtaggaatctcacttactgacaagactaatctcaaagaactctttgacaaatcaaatatcaacaacgtcaatgaacgatgtgattcaagtaaaccaagtttatttaatttttaagcgtccataatttttagtgaacactagtgacatccgctacctggtgaacacgctcgatccgaaaggcattcccgtcgtgactccggccggcgtcctgggcggacacctggacgccatgaaattctgcgagcatatcccgcaggaggagtaccccgccggagcactggccgcagccctctacctctgctcgggcgtacgcggtatggagcgcggtacggtatcgagcgtccgcgacgagaacggcaaagagatcctggccgacgtcgagctggtacgcctcgcctgcccgcgccgcgtattcacgctttcccagatcaaatacgtcatcgaccgtctggagtggctctacgagaaccgtcacctgatcggcggtctgcgcttcacctacgagccgcccgtgctccgtttcttcatgggcggtctggaaccgaccaccgactggccggcacgcctgatggagaaattccgcaaggatttcggagacagcttgtaggaaaagcctcccctaccgataaacaagtgtttgcagcacggcatccgagcccgctgcaaacacttgttttatacctccggcaaatcacttcgcccgcaccgcctgcgcacgccgttccaaaatggccggcgtgttcttcaacgcccactccaccagactgttcagatacggcatcagatcgcccccggaatcggtcaaacgatactcgacacggggcggcacttcgggatagacctctctgtggaccagcccgtccgcttcgagcgaacgcagggtgacggtcagcatccgctgcgaaatatccccgagcgaacgttgaatgtcgttgaaacgcatcgtcccgttcgaatacaacgtcgtcagcaccagcagcgaccacttgtcaccgaggcggctcaagatatcccgaatcgggcaaattccctcgtgtaaaaaagttttcattattttgcggttttatctcgttgtcgttcaacatcggttacctttttgtaactcgcttaccaaaaaatcacctcttgcagaacccgattacttattttatgtttgcactacaaaagtaactaacatatcattaataactataaaaaactcaaaaattatggcaaagaaagtagctgtattggtcgtaaaccccgtcaacggatcgggcttgtttcagtatttggaaaccttcttcgagaacggcattcccttcaggacattcgcggtagcggataccacgaatgtaaaaaccaactcggggcttcgcctccagacggacgatataatcgcctcactcaaaggccatgaacacgaatacgacgccctcgtattcgcctgcggcgacgccatgcccaaattcgcggaaaacgcagacaaaccctacaacgtggatatgttgagcgtcatcaaaaattttgcggaccagggaaaaacgatcgcagggcattgcgccgcagcactgctcttcgacaacctcggcatcgcacagggcagacgggtggccctgcatccgttcctcaaaccggtcgtcaaaagctgtatcggaacggacgaaaaagccgtcatcgacggcaacttctacacggcacagaacgagaatacgatttcctgcctgctgcccgaactgttgaaagtcctgaaataatccccgaatcgtaaacatcgaacgaagtcccggcttttcataggccggggctttgcaatttatccgaaacttccgcctccgcttatcggaaatccgactgcaccgcgatacacagtccgaaaactgcccgtttccacacaacttccacacatttggggcacgattccacagtcatcggccacacgaatatcgcaacaacaaattatcaatcaacattttgaatacaatggcacacgattggatatttctaattgcaaaaaccaaattccaataccaatgaagacattcagacttattctggctctcgcagccgtagcgctgaccgcagtgtcatgcgtcgaaaaatcgggaaaataccagaccctgctcgcccaacgggactcgctgctcaccgtcgagcaaaagtacgatcaaacgctggaaatcctcaatgagatcgaaaccggatttcagtcgatccgcgaagtcgaagaccgcgtgatgactcaaataagcgacatcgaaaacaagccgctggacaaaaaacaacagatggtatcgcagatcaaccaaatcaagggtatcctgctccaaaacaaggagcgaatcgccgaactcgaagcacaattcgcacaaagcggccgcaagaacgcttcgctggccgggacgatcaaacgtctgcaggaagaaatgacccggaaagtcgcacagatcgaatcgcttcagaccgagctgtcccaaaaaaacattgagatcgaggagctcgccggtacggtcgaggagctcaacaaggacatcgccggattgaacgaagtcactgccagccaaaaaactacgatcgaggaacaggatagccagctcaatgtcgtctggttctgcatcgccgatatgaagcagctcaaggaggctcgcatcgtcgaaggcaacggactcttcaaaaccaagagcatcatggatggcgacttcgacaaatcggcattcacatcggccgacctgcggaatctgacccgaatcgaaacgggcagcaaaaagcccaaactgctcacctcgcaccccaaagagagctacacgctcacaccgggcgaagacaaactggtaacgctcgaaatcaccgatcccgcaaaattctggagcatatcgaaatacctggtcattcggaaataaaccgattccgccggaccgaatacccctgcccgaactgcaggggtatttttcatccgggaaagtatatcggaccataaccgtcggcccaaataagaaaactcggcaaagctcgaataaatgttcgattgccctcacctttcactatctttgtagaagataggatacgcctcggaaaattgggaacaagttcccgttttctctcggctttcactatctttgccctatgatccgattatcgctcatcatcgccacttacaaccgttccgcagcgctcgtcgaagcgctccggtcggtcgtgcggcaggattttccggccgcagagtgggagtgcatcgtcgtgaacaacaattcgcaggacgacacgctcgcccggttcgaagcgttcgcaacagaacatcccgcaatcaacctgcggatcgtgaccgaaacccggcaggggctctcccatgcccgcaaccggggtatcgacgaaagccggggcgaatacatcgccatcatcgacgacgacgaacgcatcaacgaacagttcatctcttcgtacgtcgccctcttcgacgcctaccccgacgccgcatcggccggaggccctatcatacccgaatatcctgcgggacgcccggtctggatgtcgagttataccgaacgtccgatagccaatccgatcgacctggggcgaaagatccgcccgtttccgaaaggacgtattcccggcggcggcaacatggccctgcggcgttcgacggtccaacgatacggcgccttcgacccttcgctggggcggaccggcgagcaactgatcggaggcgaagagagcgatctttttcagcggttggcagatgccggagagcgttgctactacgttccgacggcaatcatgtggcatatcattccgccgcgaaagacctcccgggaatacttcgaatcgctatgctgccaggtcggacgcacccagcgtctgcgagccggaatgagggggcaaaccgtacgtctgttatcgggcgaggctgtcaagtggggcgcaacgcttctgttggctctcggcttcctgttgcggttctccgtccccaaagcccgctatctgctcctgatgcggaggcagatcacacggggaatattgaaaaaagggtgactgtaaaagtcacccttctctttttacgacacttgttccctttagaacaggtatttctccgaccggaccttctcgaccagctggaaagcgtgctgccacgcctcctcgctgaaagtcgttccgaccacttcgatcaccttcccggcgacgatggcaccgatcgtaccgcactgacgcagcgtcagcccctcgcataacccggagaggaatccggcagcatacagatcgcccgcacccgtcgtatcgacccgcttggctgcggccatgatccccacgtggaccacttcgctgccccgcttgatcaaagcccccttgataccgaccttcacgacggccagctcgcacagctccgaaagcatctgcaaggcattgagcggctcgccctcgccggtgaaggctttcgcttcgtcctcgttggcaaaaacgatatcgacgtaatcctgaatgagcgagcgcagaaattccaggttggcctccacgacattgaaactcgccaggtcgatcgctaccttcagaccgcaggctttagccgtacggaccgcaccggcaatcaactcgtgatcctgcaccagataaccttcgatatagagacagtcgtaaccttcgaaaatagcaggcgtaacctctgccgcactcaactccagcgcagctcccaggaatgtcaccatcgtccgttccccgtcgggagaaatgagcgacacgcaccgtcccgagcgctcctttccccggaaaataaagggttctatacccaggttctcaagagcctgaatgaagaaatctcccgtcttgtcggttcccaccttgccgataaagcccacgtcgcaacccaaacgggccatcgcccggatcgtattgccggccgatcctccgagcgagagcgagtaaggcagaccggcgaccgatttcgaaatctcggtctgcaaggcggcatccaccaggctcatcgaacctttcggcaaattgaacgtatcgagtactttgtcggtcttcagattgaccaacatgtctgtcagagcgtttcctattcctattacgcgtttcatgaagtcagtattgttcgaaaataatgtcagatagagaggatgcgcaccagatccaccgctccgcgatcgatagtccggtcgtggctgacagcacgcgagaagggaacatagacgatctggccgttgctcataccgatcatcacattgcgctgcccctccataagcgcctcgatggaggcttcgcccatacgcgaagccatgatacggtcgattgccgacggcgacccgccccgctggatatgtcccagaatagtcacccgggcatcgtactgcggaaactcctgcttcacgcgttcggcaagccccatggcaccgcccgtagcgggattctcggccaccagcacgatcgccgaatttttacttttgcggaatccctggttgatgagctcgcccagttgatcgacctccgtgtccatctcgggaatgatcgcggcttcggctcccgaagcgatcgccccgttcaacgccagatagccggccgtatgtcccataacctcgacgaagaagaggcgttcatggctggaagccgtatcgcgcagtttgtccaccgcctcgacgatcgtattgagcgccgtatcgtagccgatcgtagcgtccgtaccgcccaagtcgttatcgatcgtacccggcaggccgacgatcggcacatcgaactcctgagcgaaaatacaggcgcccttcaacgaaccgtccccgccgatcaccaccaacgcatcgataccgctgcgcttcatattctcataagcccggcggcgcccttcaggggtcataaactcctggctgcgggccgtcttcagcatcgtgccgccctgctggatgatattgctcacggaatccgattgcaggtcgatgatttcgtcatcgaccaatcccttataaccgcgcatgataccttttacggaatacccgttatagatcgccgtacgcgtcacggcacggatcgcggcattcatcccgggagcatcgccccccgaagtcagcactccgatacacttaattgcagccatactttttctttttactgaaaaaacgttcaaatatacgaataagtcgagaacaaaagcgaattttattcggttttgtcgagcgggagtatattcggggtaagccaaatatacgaataagtcgagtgccgagcaaaatttattttagctcggccgagcgcgagtatattggacgaagtcaaatatacgaaaaacaaccgtcctccgcaactttactccgagggaaacgaccgtcgcacgcggcagtcccgctccgccggagccgggaaattccgaacgtccgcaccttccgccacacaacttccgtgcaatatgccttgcggcgtgctccttcggtccgccacaaaaaccggagccggacttttccctcaggaaaaagatccggctccgacctgaaaaaactttttatttcgatcaacgcttttattcaaaatcaatcaaaatcatcgcattcggccgcaggttccgtcgcggtaatcttcacgcctttcgaaccgacacggatatcgactttctcaccgtcctccttatcctccaccgcgatcttcacccggccttccccggcactcaaatcaaccatgccttcgggtgtatccactcttaacaaagagttatcggcagatccggggtccggcaaagccggtaattccatatccggatcgtagctttccgtccttatctcataccattcatatccccgctcacgctcccggaccgcagaaacacccaggccgataataatcaatatccagattaggaaagtcgtcaggacggcccggcggctcggtttgcgggaagcaatcaggcacatcaacacataaatcagcaacagcaccggcaccaacgcggtcataatccccagcgacaccgtccagatgcccgcatcgatagacacaacctccggaccggccatcccgacagcaaacagaccgataatcaatgcgcatgcacccagaatcaacccgaataccagcaagccggccaggagtttcaatacaatcaggacgacctgccccaaggcataaacggccttggcaacgaccggtttggcatcggcatcgacatcgtgattcgccgccgaagcctcctcgatggattgtacggtaatccgctgtccgttttgttcgagcttctgacgcgcagtacgggctgccggtacagcgaaccacataatcaggtagcaaataaagaacacgccgagcaagttgctcatcagcggcacaagccaccagaaaaacggaatccatcccaacaacagcaacagaatgagcggcaggaacatcagcagacggatccacgtgggactggtcccgaaatacttggccacacccgaacagacaccgcccaggcgcgcctggtccatatcccggtacaggcgacgcggaatccggccttcgccgcgcggggcttcacggccctcctgttcccgaatggcttcggcagaccccatttgagcgataatctcctcgaccaacgatagctccaccactttagaattatcctggtgcgagagaatcagctcggcgatacgggcctcgatatcctcgacgatctcctttccgccgtcggtatttctatacgtatcgttcaagctctccaggtaacgcgaaagcacctgaaaggcatcggcctccatcgtgaaggcaatccccgaaatactgcatttcttaacctctttcatcgcgatcggtctatttgagttcgttattcgctgcaccgcgagtagaaccgccgctcgtatcggcagaattcacactgcacggtccagcataggaaacgcttccggcgctcgacgttcgggattgcaaagcctgctcgcaatagacccgaatatcggcagcgctcgacgcctccgcctcgcagaagtgtgcgaccagcttccgggcatcgatcgacgcagcggaagaggcttcgaacaccgctttctgcaccgccccctgcaacagaatcgacgatgcactcgaagcatccgcttccagacggtccgcatcgatctgcgccacgactttagcgctgctcgaagcgtcgatttcacacgtttcgacctgtgcatccacacggatcctggctgcgctcgacgcttcgatctccagcattctgccggtaaagagtgtcttggccacgatcttcgcagcggaggaagcctccaatttgcggatatttccgttgtaaggtacgcgcaccaggatctgctccgaaggcactgcatgaatgcgaggagcgaccgtaatcttcaactcgccaccatcgatcccgacccgcacgtactcgatcaggttatcatccgcacagatttcgatatcgccgggctcgtcggtaagcaggaccttcactccgcgcgaagcatcgatggtatgaaagtttccgaccgccacggtgcgggttatcagatttccgcttcccttgatccgggtttgaccgaagatactgcctccgcacgctgtcgtaccgaacagaacggccatcattgccaacagggccatcatcaattttttcatcgttttcagttttttaattaatcaatcggttatgccgggtcgttttcccggtggcgaatcatttgaatttgtcctaccagttcctcccacgcttcatccagcgaagccaggtactcccgccccttgtccgtaagggaatagtacttgcggggcggtccctgcggggactcttcccaccggtaagtgagcaggcccgcattcttctgccgcgtcaggatcggatacagcgtcccttcgaccacgatcatctccgcctccttgagttcggcgatgatcttcggagcataagaatccccctgcgagaggatcgccaggatgcagtaatccagaatacccttgcgcatctgcgcctttacgttatcctcaaccatatcatcgttgtttatacattgaatttcttatttcatgtttcagctccgggtccggtccgcatatcggaaatacgcaaccctttccccgggcagtttccgggctgtcccggattcggcctaccgggaattcccttcgagccgtttgggacctttgggtacgacgatccacaacaggatataaacccaaatcgacaaaccgccgaccagtaccaggagcagcgtcgccagccgcacctttcccgacgggagtcccaaataatcggctactccggcgcacacaccggcaatgactacatcgtccgacgaacggtacaatctcgcatgatttctttctgctttcatagatttccatttttagaagctgtttgaattttattcgagattattcgaaagccgttttcgagtagattctttttgggtagttgccgtaaattgcgggctattttcaaaaccagctaaaaaagaagataccgaaaagaggctcaaagaagccgaaacactttctcacagcgaatgttcaactcatctataaaattcaaaacagattcttagatttcgaagagatacaattcaaaggttccgacggaatcacgatccacaggatgatgtaaacccacagcgacagaccgccgaaaagaatcaggaacagcgtgataaggcgcaggatcgtcgagtcgatcccgaagaactcagcgattccgccgcacacgcctgcgatcgaacgattcgtccgcgaacggtacaagtgccgggaactgacgcacgaggcactctccgcatccacggacgcctcgtctcgcttctccccggtcggcagctcgccgaattccgaaggatcgcccatttgcgccatcgccccctgcaccatctgaagggtaacgaccatcatcggcgatgaaatcctggaccggaaaatctctgccagtcgggcttccacatcgttgagaatttccggatcaccggccggcaaccgccgacggatcgcatccaggtactccttcaaccgacggtaagcatccttgtcgaaagtaaatgcctgggaagccaaatttacgctaatagtctctttcatggtcaatatctatcattaataaatgagttgtatattctttacagttctatcacactacaaatataatgtaaaagtaattaccatgcaatacatagtactattttttcaacaaaaaatttcgtttaccaataatttcacctctataaatataaaaaaagcgccagaggtaaaccggacgctttaacataagatagaaagactaaatatataatatttccacgaaactaataaatgcctctttcctttaatatcatcccccaaccacttccatccttatatttaaataatataatttgggtaagagcattccctttaccaacttctattgtaccatcagaaaacacataaagataagacttagaaaatcgcttcctataaatctttttacccgtattattatccacaacaactactttgactccattggtaaaataatcaccaagttctgctgccttaaatttaacaatcacatctaaataattgttctgttctattgccgccaatgaaacatttcgatataaagtaattccccctattggcttaacactctcgccttcactttgcgcaaaagtggaaacggttgaaaaaataaacaagaatacaacgaatacttttttcatgatatcaaaaaacaattagataaagaacaaaacacaatcattagacctcatttccattaaaaatcatcaatataaaaaaagtggacaattcgagagaattgtccactttagtagcgggaggaggactcgaacctccgaccttcgggttatgagcccgacgagctgccaactgctccatcccgcgatatatcgtttattcgatgcgaatattccgcttttgtgactgcaaagataaaacaaaaaaatggttctgccaaatatttcgacaataaacccaaaaacaaataccgattaagcaggccttcaagccgatgaatcactcctcgcgcttgcagccggcaccaatcaattccgcctgaaagctcgcatactcctccggagttacgaatttgtcggcactgatcgtcagctgtccgaccggagtatcgatccgaatccgaacatcatcgctcgtaacgatcttcaggttctttatctcgacattcaaccgtcgggtctctcgaccacggaccacggagaggtgcaatactccctcctcgatctcgatcgctccattctgaatagaccaccgatcctgatcgcgcatcttccgaaacacaggatagaccagtaccgcaacagacaacaaaagaaaatagccgaatatcagtttccaatggagcgaggtaaatggcaattgctccgcaaaaaagattttcaacagcaaaaagaacagaagcattgcgactcccattcccaaaagaagccgacgaaaacgcgtctgtctcgtatcgtcataaccgtatttactcatggctcgattttttaaatgccggataaaagccatccgactccattccctacgactcgaatatacgaaaaattagcgaatatacttccccgaccccagaaaaattccgcaatacggctctacaacgatgttctgccacaacagcgccttctcatagaaaccctacttcatacgcctcctcaccgctccatccggacataccatcgggagcagacgaacgtcagacgcccttgtcgggcacagccgccactgtcttcgacactaaagcagccgccacgacctcggctagatccagcacctcccggccgtcagctccgcgtgcgatagcttttttacaaagtggacaagccgttacgatcgtccccgctcccgtagcgctcaactccttcgccacggaacgcgccaagcgaagctgctgcgcgtccgaaatcgccgtattggccaccgaagagccgcagcagagggcgtgttcccgcgtctgggccggttcgagcagcacgcccaccgcttcgatcacctcgcgcggctggtcgtaaatacggctcccgcgtcccaattcgcaggggtcgtggtaagtgaatgtctgcgcccctcggcgaagctgcaggcggccgtcccggatcaatcgcagcatatactcggaatggtgcagcacttcgattccttcgagatgatactcctcccggaataccttcaggcagatcgggcacgaagtgacgagcgtcgtaatccggtgcttgcggaaaagcgcaatgttgtaatccatcatcttgcgggccgaatcggtttcaccggagagcttcagaggccggccgcagcaaacgccgccctccttgtccgcccaccagacctcttcgcccgaagccttgaaaatccgctccatcgccaacaggatacggggcgtcagcagggtcatacacccggcgaaataacccacgcggccctcgccggccgaacggtccaccccctgaaaatactcgtagcgcttctcatcgggcgtattgcgcatcgtgtcgcgggaattcagacgcagcgtattgagttcgatccccaccggacagcgctgttcgcagcggccgcacatcaggcagttgttcgccaccgactgacgcaggtggttataccgccggtcacgcaggaaatagaccgactgcacgtcgtcgatccccaattcgctctgcaactgacaagggtcgatgcagatgccgcaccgcgagcaggcatcggtctgaaaacggtcgaacgatccctccttctcggtcgaatgcagcttgtagcggcgcagaaaaatcaggggaatttcggtgaagatatgcatataacgcgagaagggcagcactatgaaaaatagccccagacagatcgaataggcccaccacaacggctcgtacagcgtctgcaggacgatcggattgacatgatgcgccatccactcgccgatcgtacccgtgagaaatcccccgccgccgtgcagagcgcaggtgatgctttcggccagcaggcgggccgggaagatcagccacagcaccgacagggcgattcggtcgcccagtacgtgcctggtcgtgcggtgcatgcccatcgcctgcgaatagatacgcttgccgaaagccagcgtcacgcccgaaagtacgaacagcagcagcagatccatcaggaaatcgaagaccggcttgtgcggcagttccgtggcgaaatatttgaaaaagacatgcccatgcagcggaacgtaccggaaccccaggtaggcgaccgtttcgatccatccgacgacgatcagcaggaaccatccgaaggccaggctcatgtgcatatagcccagcaagggattgaccttgaagatgcggcggtgcagcagcgattcgcgcaccacttcccagaccgccaatggcgtctgccgcgaaggaatgcccttgacgatccgcatgcggtcggcagccgaaagaccgaagatccaggagccgtatttgacgatcagaacgacgaacatcgtcacgacgcccacgatgaacggaatagagaatgtcgcgtaaaaattcatcgtcagaaatcccccagtttacgtttgatgagcatcaccacggcccgcgtattgattccacgaggacacaccaggcggcatttgccgcacaacatgcatttgttcatctgttcatagacgccctgatattcgccccggcgcacgagcgtatggagtttgcggaaattgaaatccgtaaggttgccggccgtacaggtcgccgtacagccgccgcagccgatgcaggtctgcaattcgggcatctcgcgcaggatctcgtcgctcttgcgcaggttgttgctgtcgatgtcgatcacgcgcggcttgttgatcgcatatccccagttgatcgctgccatgactataccctccccagataagccgtcagggcttccactgccgcatcggcctcgttcaatgtttctccgatattcttcggcgcggtgaccgtaccggcgtaaaagatcccgtccacaccgctgcgggcgctgttcaagaagaggtcctgcggttccatgaagccgctgggcgcctgcctcaacccggccgaagccgcgaaatcggcgttcgaatcgttcgcccgcatcccgacgagcagcaccagcatatcgacgctcatccgcaaaggacgccccgtcagggtatcttcggccttgatctgcaaccggccgtcgtaggtcgggctcgcttccgaaatacgtccgcgcacgaaatgaatattataattctgttgagcctcgcggtacatctcttcgtaacctggcccaaacatacgaatatccatatagaaattaaagacgtcggcatccggaaacagccgcttgagttccatggcctgtttgacacccgtgatgcagcaaacacgcgaacaatgcgcctggcacaccttctcgtcgcgcgatcccacgcagtgcagcagggcgatccgacgcggacggcgaccgctggaggtagtcacattcccttcgttgagcatccgctcgatgtcggccgaagtgaaaacattgtcataaaccccgtagccgtattcctccttgagccgggcatcgaaaagcgtgaagccggagcaaacgaccaccgagccgcactccagggtgcggccgtcggccaacgtcacgctgccgggggtgatcgacaccgcttcggcggaagtcatcacttcgacatcgcgtgccgccagtcggcgacgcaactcggaaagcacctcggacgcaggcgtcagcgacgggaacagatgataccatccccggagcttgccgcccagatcgggctctttctcgacgatcgtcggacggatgccgcgatccgcaagccgcagtgcggtctgaataccggcgacaccgccgcctacgatgataacctctcttttcattgtgccttgatattatagatcatatcctgaacgccgcaattgacggccgaaggtgccggtttcccgatgaattttccgtggcgccccaggtatttggccgcaggatcgtagtcgatgcccattttttcgagcagcggctccacatccacctggtgcatctgcatacccagttcccagggatcgtaacccagcaccagaccggccatctcctcgtacgtcagtaccggaatacctcgtccgtcctgaccgtaggtgacgccctccatctcggcgatcgtatattgccatttgtcgaggaacatggcgcatcccggacagttggccacgatgaaatcgggcttgtagggagccatgctctcgagtttcttgtgcgaattggccaccgaatagccccggttggcctgcaccaggtagttgcggaatccgaaaccgcagcaatggcgccgctcgggataatcgacgcactggccgccccacgcatcgatcataccggcgagcacataaggaaattccgaaccgccgatacccgccttggggaaaatcttggcgtagtggcagccgatatgttcgaccacccgcagcggctctccggtggcagcattgaccagccggtatttcgccttgcgggcgatctcctcgcgcaagtggaaaacgatgtccgaagtgtgggccaggcttttcggcttgcggaactcgcggccggtagccttataaaggtattcgcgcgtctgttcctccttctcgggaaactcctcccaggtagccagtatctcggtatagatgccgaacgaagtgatgcacgaagagatgaaattctcataccccgcatcggtcatcagcgcgaactgccgggccacgaccgtcatgatcgtatccagcggcacgatgtccgaatggtagccgatgcccgtacacgaggtgtgcagcggatcgtcgaagacatcgcgtcccagatccttttgcaacatgttcaaaaacgccttctcgctgcccggaaaaaagttctgacggatgcagctgcgcacatagtaatatttatcgtcggcgatctccttctggtaatcgctccagctcgaccgtttcatacgctaataatgttcgttggaatttttggtgtaggtatccatcatgtactcgtcgtccgcaccgtcgtatcccatctcgcgggccttgcggtcggaatgcttttcgatcgtgtcgaaaaactccttgccgcccgtgacgtcgaatatccggtgaagttcctccatggaccggtcgtccagcttgcgcagcgccccggcaccgggacggttgtaagcggcagaaaactgtccgtaaatctcctcatcgttctcgtagatccactcccaaaccgtaccctgctcgggatgcagctcgggcttcaccagtttcggggtcacacagtaacccgtacggaggatattctccccgatggtgcgcttgagggccagttgctgccgccccttctcgctctcgacgaagaaacccagcttctgggagagcgtccgcagcgcctggatgacataagcgggagtattgcctcggggacagcggggccggcacgacatacactcgccgcaataccagatcacgtcgctgcgcatgagctcctcgatcgcatcgtcgtcctgcgtctgcacgatattgacgatctgacgaggatcgtaattgtaaaactccgccgccgggcagacgcctgtacacacgccgcaattcatgcacgaatgaaggccctccctcatccgcacatcctccatcagcatatcgaaatacttacccatacaaaaaagataacttcgcagcagcaaagttatccattccccaggtatcgtacagtagtagaaatacctattttcgccgtctgtaatgttcgaacgcaaaggggtaagggaactcctttcccgaagcaaacgactcgctgtcaataatttcccactcccgttcatcccacctcggaaaacaggtatcgccttggtaggcatggaacacccgcgtcagatagaactcgtcgcacaggggcagcgcctgggcatagatctgcgcccccccgatgacgaagaccttctcttccgggcggaaaagcgccagcgcctcgtcgagcgaatgcaccacgtcgcacccttcgatcgaaatattctgccgcgtgacgaccacgttgcgccgccccggcagcggacgtcccaacgactcataggttttgcggcccatcaccaccggatgtcccgtagtgacggccttgaaatgcttcaaatcttcggaaatatgccacaaaaggcgattctcaccgccgatcactccgttctcggccactgcgacgataatggcaatcatgtctaatcaatcgttttttcttttaatatcagttcgaagccggatacggatggcaggatccgctgtttcgcatccagcaaggtcagcgtatcatcccctcccttcaacaagttgatcgtttcgttcccctcttcggtcacgagctgccagacggtcgcatccgcattttcaggaatcccccgtaacgtatatctgcggcctcgcctcacggacacctctctccggcaggcatcggcttccgaataaaaccgctcgagtgtgaacgtaccgtcgccgctgtgttcccggctttcgatcgtaagcttgacacaagtttttccgtcgccggaagcctccggaagaattccttcatataccagcacctgccagccgcccaatccctccgggtccatcgaggttcgaggaacttccgtttcgaccttaccgcctctgtccgcatgcgaacacgacgccgacaaaatcagcactgcggccgacagcatatacagaattacccgcatagctaaaacgacatcggagccttgatcgccggccagggatcgtaattctccaacgtgaaatcctcgtaacggaaatcgaaaaccgaccgcaccgccggattcagccgcagggtcggcaacggccgaggcgtgcgggacagctgctcggcaacctggtcggcatggttcagataaaggtgcgcatcgcccagcgtatgaacgaaatcgcccggacgcaatccgcactcctgcgcgatcatcatcgtcagcaccgcgtacgaagcgatgttgaacggtacgcccaaaaacgtatcggcgctccgctggtaaagctgacacgaaaggcgccctccggccacgtaaaactgaaacagcacatggcagggcggcagcgccatatcgtccacctcggccacgttccacgccgataccagcatccgccgcgaatcggggctgtgtttgatctggtcgatcacctgccgaatctggtcgatgcaccctccgtcgggacggggccaactgcgccattgatagccgtacacgtggttcaaatcgcccggacggtaaccgtcgatcgacgaaggctcttcccgccgcacggcatcgagaaaggcctcccgctccagcggcaaaaccccgtgacggacacaaagctcgttgtaatagcgataagcgtcgttatcccagatatggaccccgtgatccagcaggtattttatattggtgtcgccctgcaaaaaccagagcagttcgtaaatcacccctttcaggaaaactttcttggtggtaagcagcggaaatcctacctccagatcgaaacgcatctggtagccgaagatgctgcgcgtaccggttccggtacggtcgctcttcacaatgccgtcctgtcggatcttacgaagcaaatcgagatactgttgcatggtcgaatcaatattttttcaacgaagcgttgccctcggggtcgatgaccgcataaaccggatcggagtgccactccccgaggcacagcacccgcaaatttccttcggaatagtcgcgcggctggtgcatatggccgaagatgaaataatcggggcgttcggcaccggcatattcgcgggcatattcgatgagcgggtcggtaatatggtctcccatttcgctcgccagatgacttttgcgggacttgccgctccaccactgcccgaaacgcatcgcccagtcgggatgcacgagccatgaaaaaaggaaacggatcgttttggaacggaacacggcattcataaagcgcagcacaggaagatgatcgatcttcatattgtcgccgtgcgccaggaaaacccgtttgccggcaagctccatgatcctgggcgaagtatagacctccactccgcactccgcttcgaaatagtcacgaacccacatgtcgtgattacccgtcatgaaaaccacccgaatcccccggtcggtcaattcgcacaactttcccaatacgcgcacaaaccctttgggaacgacccgtttgtattcgaaccagaaatcgaaaaggtcgcccagaataaagaccgcatcggcatcgcgggaaacttcgtcgagccacgccacgaaacgtttctcgaccgcacgggccgcagccggccctcccgcgcccaaatgaatgtccgatgcgaagtaatacatagcctattcgaattgcgcttcgagcgcccgttgcaaccccgtaccgtaaagatcgcgggccactacgataccctcacgatcgatcaaaaagttagcaggcagtttctgcacgttgtaaagccccagtgcgggagaatttcgtccccggaaatcgcaaaccgaaatccagggaagctgctgctcctgcacggcgttgatccagatatctttcgaaacatccacaccgatctggtaaatttcgaatccccggtcggcatattcggcataaacctccttcaattcggcgttgatggcgttgctgtttcccaattcggccgaccagaaatccaccagcacgacctttccctgcaacgaactcaaacgcactttacggccgaacatatcgggcaactcgacatcgggaaaattcgtttcggcgatattcgacatcagattttgccgcgcatccatgcgggcgatctcactggccagcaacggcaggtaggaagactccggataacgctcctcgatggcttccgccaccatgcggtagtaaatcacatctccgtcgaggttgaaaaggtaagtttcgcccggaagccgctggtacaaggcatataccccggccagggaagacttatgctcgacgatgaacttgatctgttcgtgtttgatccggcggtattcggcccaatattcagactcgatccgtcgaatctcctcgtcggtcatcctgtaagtttccggcgaagaactcaacgcatcgagccgctgcatcccggccacaaacggctgataaaatcggcgcagcaactccgactcctcagacccttcgaccgtatagttgtgcaccacacgtccgaccgagctgaccgtcaagcgatctccgccctgcaggaacaggggaatcttatcgccgttgcagaccaggttgtaaagcgccggagtacggtccacatcgcacaattccaatttgtaattcccggtttcatccagttgcgccgaatcgatgagcgtctgcgccaacggagtaacctgctcgagatagatcatccggcaatccgaaccgactatacgacccgaaatcttaaccgtagaagagtgacaggaaaccgccaggagcgcccctgccagaaaaacgatcgaaataaaaaatctgctgcgcatgttgcgagaaaatggtttatcaaaaaacggaaccctatttcgaggtattgtgccgtgcgcccccgttcttgccgttgaaattgcgcgactgatgctgattccgattcttctgttgccgttgctgcgctcccttctgacctttctgacctttttgcggatgcgccataaagggctgtttataatcgcttcggatattattgagagccacttcgtcgatttggatcgcatttccggacattttttttatgtcttttatgataacctcgttattcggatgttcctgattgtactcgtagctcttggtgcgcatgtaacgcgccaggttatcgacggtccgcgagactacctggggattcttctcatcggccagacgccggatcatccgttcgacatatttgccgtaatgcttgtactcgatatgtcccgacgaatagggcatacgccggggcaccgtggtaagttcctggcgcgaaggctgcggatagggggagtccacatccagttgaaagtcggacatgatgaacaggtgatcccacagcttgtgagtgaagtcggccgtatcccgcaacaggggattcaggtttcccataacggcgatgaccgcacgggcctgccggttgcgctcgcggcggtcttcgatctgcatcagcgaatcgaccatttcgtgaatatggcggccgtattcgggcaaaaaaagcttccgtcttttataattataatttttttgcataatttttgcgggagttcggtggcattgttattgcgaaccgttccaataacattctgaaaagatttcgcggatataaatttcaaagcgatcgtaaattcacctttgaaatcaactttatctacaaagttggattcctgcgaataatatattaacttcgtcacaaaagtacgtaaaaaaatcacaaaagcaaggtatggcaaaagttttaatcctggatcaatcgaaaagcatacgcaacacgctgcgagaacggctggagtttgaaggaatagcggcggaaagcgctgaaaatgaagcggcggcatccgtattatgcgaacgtatccctttcgatctgatcatttcggatcatgaaacgaggcttcccgagagcgacgtacctttcatcgtactttcctctgaagcgacggtcgattcggctatcaaggcactccggaacggagcgcaggactacctcaccaaaccgatcgacatgaaccgcctgatgcagtcgatccggcaaacactcgaacaggcagccgaagcgccgcgcacggcggcaaaagccaaagcgaaacgcagctcggcaggtcacacggaagagatcataggcacttccgagcaaatgcaacacgtccggcgtctgatcgacaaggtcgcaccgtgcgacgcccgcgttctgatcacgggcgagaacggcacgggcaaggaactcgtcgcccgctggctccacgccaaaagcaaccgggccggagcgccgttcgttgaggtcaactgcgcggccattccctccgaactgatcgaaagcgaactgttcggccacgagcggggagccttcacctcggccatcaaacagcgcaagggcaaattcgaacaggcgagcggcggaacgctcttcatggacgagatcggcgacatgtcgctggcggcgcaggcaaaggtgctgcgggccctgcaagagcgcaagatcagccgcgtaggcagcgacaaagacgtcgatgtcgatgtgcggatcatcgcggcgacgaacaagaacctgcgagaagagattaaaaaaggaaatttccgcgaagaccttttccatcgtatcggcgttatcctgatcaaagtaccgcccctgcgcgaacactcggaggatattcccctgctggtcgatcacttcatcgatatgatctgcgaagaatacgacatgccgcgaaaaccgatggataaaaaagcggtcgaaatgctccggcaaatgccgtggacgggcaacatccgcgaactgcgcaacgtcatcgagcggctcgtggtcctgagcggcaccaaaatcacaccgaacgacgtagaactctactgttaaacatttcagagcaactcgagaatctcaccggggcggtccactacgtggtctgccccgtgttcatacaactccgcccggtcgcggaagccccaagtcacaccgaccgaccggacaccggctgcccgggccgtatccatatcgacgcccgaatccccggcgtacagcaccgctccggattccgcatccgtatcggcgagaatctcccgcaccacctgcggatcgggtttgagcgggactccggggcgctgaccgaaaaccgcatcgaaacggatcgacgggaaatagatccgcaccaacttctcggtaccgatttgaaatttgttggaagcgacagccagccggactccacgctgcaccaactcccggagcaattccggaataccctcgtagggacgtgtaaaacggtcgatatgttcggtatagtaagccacgaaatccgcacgcaccgccgccaccgtttccggcgtgcgcagctcctcgggcagcgcccgttcgaccagccgcataacgccgttgccgacaaaaccgcaatactcctcataggtatgcaggggcaatccccgcgcagccagcacatgatcgcagcaagccgccagatcgccgatcgtatcgagcaacgtcccgtccaggtcgaaaatcatcaatttcgtatccatatcaagtccttgaattacaaataaatagtccgaaaacgggcaggagccgtgttcctgccccgtaaaaacggcccctatcggccgaaacgcccaaagccgagccaaagatacgaataagccgagcgcaaaagcaaatttatttgcgttttgccgaggcgaaatatctaaaattacaaaggagccgagcacaaaggcgaattcattcgcttttaccggtccaagcgcttgaaacggccccgaaaaagggacaaaaagctgtccgaaggcaacgatgcacgcgaaacattttgttatttcgggattttgagtttactttgtcatcatcgtataaatcggacaaaacctatgaaaacagacatcgaaattgcacgcgaaacgaaattaaataaaatagaagacatagccgaaaagctgggggttccccgtgacgaagtccagaattacggccgttacatcgccaaggtgcccatccacctgatcgacaagaaagagatggacaagcacaacctgatcctggtttcggccatcaccccgaacaaggcgggcgtcggcaagactacggtatcgatcggcctgtcgcttggcctgaacaaaatcggaaagaaagcggtggtcgccctgcgcgaaccctccctgggtccctgcttcggcatgaagggcggcgcagccggcggcggctattcgcaggtgctgccgatggaaaacatcaacctgcatttcacgggcgacttccacgccgtgacatcggcccacaacatgattaccgccctgctcgacaactacatctaccagaaccggaacagttgcgaggggctgaaagaggtcaagtggaagcgggtgctcgacgtgaacgatcgcagccttcgtaacatcgtatcggggctgggaggttcggccaacggcattccgaccgaaacgggattcgacatcacggccgcctcggaaattatggcgatcctctgcctggccaccgacatcgacgatctgaagcgccgcgtcggcaatatcctgctgggctacacttatgacggcaagccgttcacggtgaacgacatgggcatcgcaggcgccatcactgtcctgctgaaggacgccctgcttcccaacctggtgcagaccaccgaaaataccccggccttcatccacggcggcccgttcgccaacatcgcccacggctgcaactccgtgctggcgacccagatggccctgacctacggcgattacgtcatcaccgaagccggcttcggcgcggatctcggtgcggaaaaattcttcaacatcaaatgccgcaaagcgggcttgtccccgaaactgaccgttatcgtagcgacagcgcaaagcctgaagctgcacggcggagtccccgaagcacaaatcaaagagcccaacaaggaggggttgatccggggattcgccaacctggacaagcatatcgaaaacatgaaaaacttcggccagcaggtgatcgtcaccttcaaccgcttcgccagcgatacggacgaagagatcgccctggtcgccgaacactgcaaggaaaagggggtcggctttgcggtgaacacggtcttcgccgacggtgggaaaggcgcagtggaactggcccggctggttgccgaaaccatcgagaaaaacacatctaaacccctgaaattcacctatgaagagagcgattcgatacggaaaaaggtgcgaaaaatcgccgaaggaatctacggagcctcctcgatcgtctatacgacgctggcggaaaagaaactcaaggagatcgaaaagctgggcatcgcccacttccccgtctgcatcgccaaaacccagtactccttctcgtccgacccgaaagcgtacggcgtagcgaaagatttcgaactgaaagtccgcgacatcatcatcaacaacggcgcggagatgatcgtagtggtcatgggcgaaatcatgcggatgccgggtcttccgaaagagccgcaggcccgccacatcgacatcgtaaacggactgatcgaaggattgagctgattctgcggggtgcgataaaagatcgaattttatcgcaccccgatttttcacggcacaagttccgcaacagtccgtcccgatttggcggattcaactattatttctatttttgagtgttttaaaatcgttgaatttctcgactattttgtgcccggcataacgaatcgactcgctctgccctgactgatcgaaaacacttcaaataatggcaaaacgcatcccgaccccggccgacatcttccgattctacgtggacggattccgctcgatgaccctcggacggacgctttgggccattatcctactgaaactcttcatcatgttcgccattctgcgacttttcttctttcccgaccaactggccggcatgagccaggaacagcgcagcgaacacgtactcgaacaattaaccattcccgacgtttccggcaagtgaggccaccgcaagcccctcccggacagcggaaacgaagactaaaactcaactaattatctcaaaagtatgttgtcggactatctacaaaccgtcgattggtcgcgggcccaattcgccatgacggcgatctaccactggctgttcgtccccctcacgctgggattaagcatcatctgcgcgatcatggaaaccatctactaccgcacgggcgatcccttctggaaacgcacggcgaaattctggatgcgcctgttcggtatcaatttcgccatcggcgtagccacgggcctcatcctcgaattcgaattcggcaccaactggtcgaactactcccacttcgtcggcgacattttcggcgcgccgctggccatcgaaggcatcctggccttcttcctcgaaagcacgttcgtagccgtcatgttcttcggctggaaccgcgtcagccgaggcttccatctctccgccacctggctcacggccgtcggcgccaatctgtcggccctctggatcctggtagcgaactcctggatgcaatatccggtaggctgcaccttcaacatcgacaccgtccgcaacgagatgacctccttctgggacgtactcctctcgcccgtagcggtcaataagttcacccatacggtcacctcgtcgttcgtgctggccgcgctgttcgtctgcgccgtctgcgcctggtacctgctccgcggccgcgaacagaagatggctcgcaagagcatcgccgtcgcttcggttttcggtctggtattcgctctgattaccgcattcacgggcgaccgctcgggagcgatcgtggcccgggtgcaaccgatgaaactcgcggctctcgaagccctttacgacggagaggagggggcagccctgaccgcagtcggcatcttgaggcccgaagccgaacgctcgaacaacgaggatgccttctatttcaagatcgctattcccaaaatgctgtcgctgatgagtttccgcgacgccgacgccttcgtaccgggcatcaacgacctggtgaacggcaaccctcaatacggcatcatgccgacgatcgaaaagatcgaacggggccgcgtagccatcgcggaactggagcgtttcaaacaggcccgcgaaacaggcgacgaagcgaccctcgacgagatacgggccaaattcgatccagacacccccgaaggagccgtcttcctgaaagagtatttcgcctatttcggctacggttacctcgactcgcccgcgcaaaccgtacccaacgtaccgctgcttttctactcgttccgcctgatggtcggcgcagggtgtcttttcatcctggtgctggctgccgcctggtggttcaaccgcagggacacgctcgaacgcaagcgctggatgctgtgggtgctgctcctctgcatgccgctcgcctacctggcctcccaggcaggctggatcgtcgccgaagtgggccgccagccctgggcgatacaggatctgatgccggtcggtgtcgccgcttcgcgcatcgccagcggctcggtcgccacgaccttcttcatcttcctggtgctcttcaccgcactgctcgtggccgaaatcagcattctctgcaaacaaatcaagatcggacctgaaaaagagtaaaaattatggatactttggcattgctgcaacactactggtggttcctgatctccctgctgggagctttgctggtcttcctgctcttcgtgcagggcggccaaagcctgctctacaccatcggacgtacggaacacgaacgcaacctgatcgtcaattcgctgggccgcaaatgggaactcacgttcactacgctggtaactttcggcggcgcgtttttcgcctcgttcccgcttttctactcgaccagtttcggcggagcgttttacgtctggatgctgattctgctggtcttcgtcctgcaagccgtttcgtacgaataccggcgcaaacccaataacgtattcggagaaaagactttcgactggttcctgaagatcaacggatttctcggaacgatcctcttgggcgccgctgtcggcacattcttcacgggtgcgaatttcaccgtcgatcggttcaacatggccaacctgggcggcgacaccacgatctcgcagtggacgactccctggcacggactcgaagcggtgctcgactaccgcaatgtggcgctgggactggccgtgctgttcctctcgcggatgctggcgctccactacttcatgaacgacatcgacgacacacagatccgcgaacgctcgcgccgccgctcgctctgcgccgcaggaacattcctcgtgtttttcctcgtattcctcgtaagcctgctcttcgcccagggttggagtgtcgatccggcgacgggaatcatcgctccggaaccgtataaatacctgcacaatttgctggccatgccctacgtcggcatagggcttctggcgggtgtggcgctggttctctggagtatctggctgggctggcgcggtagccgcaaggcgatctggctgagcggatcgggaacggtcctcacggtgctcgccctgctgcttacggccggatggaacgatacctcctactatccttcgctggccgatatgcagtcgtcgctgacgatctacaactcgtcgtcgagcgaattcaccctcaaggccatgagtatcgtatcgctctgcattccattcgtcgtcgcctacatcggctacgcttggtgggccttgagccgcaaaccccaagacggctccaaagaagaactcaaatactaaagacacttcgacgatccctcgatcagcgggcccggaagagtgatcttccgggcccgctgcaaaatggcaaaaccgtcaattcaggtttttctcgataaactccttcaaaatcaccgcatggttctcaaccctgttcttcgaggcatagagcaacgtcacatccggataggtccgaatgcggtcgagaaaatcctgcatggcagccgaactccccagctcatcgaggtacttgcgccgaaactccgcccaacggcctgccggatccccgtgataccacacccgcagcgacgtcgaaggagcgatccgcttcgcccacaaatcgtaatgaaacgcctctttgcgaatgccccgaggccaaagtttatccaccagcacccgaaatccgtctccgggactttcagggtcgtaaacccgtttcagccgtacttccatattcgtcttaacaatctgtactcgcttcaacaaataacgggcaaaataccccggacaacttcaaaaaaataccgatatgtataaaaaagatggattcatcacaccatccgaacacgtaaatttcctggccaaaaatctgttcggagcctgcggccagatcgtaaacggcgccatcgcctatctcgcccctgacggcggcggccccgtcacgccccacacccacgctaccgaccacctgttcatcgtcacgcagggagaagccaaagtgctgctggacggacaagagcgaatcatccgcgaaaacgaagcgttcgtcgtcaaaggcggtattccccactccgtatggaacaacgcacaggcagaaaccgtcatgataggcattacgctgaaaaacaacgaaaatggtaaataagtcgatacaccgcacgaatcaatttcgtataccgtgcccccaatgcactcattctatcctggtaactgaaaagccgcaagcaatgtttgcggcttttcaaattttatcgtttgaaagatcagggattgcggatcagcttcacaaaaaacacctctccccgatccggccggagggtacaaatgtcccgaaacaaaaaacgtatcggccattctatcgcggcagcccattcgaacgactttgccgcgttgcagagacaaaaaagctgtgtttccgtacaacatttcgccccggttccactcttcggcagagcgcgctcgacttcgcgttaccgcatgccgcccgtccttccctccgtcggaccggaggcgaccttgcgaactcctgattttcgcctgccagccatacgaccaacttttatcttaagaccgttccggacaaatttgtccaccccgaaaataaaaaaggttgcaaacgaatgtttgcaacccagccgaccacccggtcgtttgcggagagagaggctcccgaacctacgctttcagaaaatatcataaaattgcaaatcattgataatcatatattatctacaatgcagagtaaatctaaatctttctaaatgccttttgctatttcaatttttgggtgtatatttgggtgtagaatttcaaacgcacccaattatgaatatcaaacgtaacatcatttttgcattggagagccggaagaagaacggtgtgccaatcgtagagaacgtgcctatccgtatgcgtgtcatatacgcaagccaacgcatcgagtttacaacaggctaccggattgacgtagccaaatgggatgccgacaaacaacgggtaaagaacggatgcaccaacaagctgaaacaaagcgcatccgaaatcaatgcagacttgctgaaatactatgccgaaatgcaaaacgtgttcaaggagtttgaggtgcaggaaaccatgcccaccacccaacagctaaaggatgcgttcaatctgcggatgaaagagagcagtgaagaacaacaggaagaagcaccgattagtttttgggaagtgtttgatgagtttgtaaaagagtgtggcaaccagaataattggacggcatccacatacgagaaatttgcagcggtgagaaatcacatcaaagagttcaaggaggatgtaacctttgaatacttcaacgaattcgggctaaatgagtatgtcaatttcttgcgtgacaaaaaggacatgagaaacagcaccatcggtaaacaaatgggatttctcaaatggttcctgcgttggagcttcaaaaaaggacatcatcagaacattgcatacgacgcattcaaacccaaattgaaaacaacccctaaaaaggtaatattcctgacatgggatgaactgaacaaactgaaagattatcatataccgcatgacaaacagtatttggaacgtgtcagggatgtctttctgttctgctgcttcacgagtttacgatattcggatgttcgtaaccttaaaagaagtgatattaaacccgaccacattgaagtcaccacagtcaagactgcggacagcctgataatcgaactgaacgaccacagcaaagccattcttgaaaaatacaaggatgttcatttcgagaaccacatggcattgcctgtcataagcaatcagaagatgaacgattatctgaaagaactgggtgaactggcagaaatcaacgaacctgtacgggaaacctactacaagggaaatgagcgcatagatgaagtcacacccaaatacgcattgttaagtacccatgccggaagaaagactttcatctgtaatgcgttggcactcggaattccggcaccggtggttatgaaatggactggacacagtgattacaaagccatgaagccctacattgacatagcggatgacatcagggcaaacgccatgaacaagtttaatcaactataaaagtatcaattagtttcatagattaccaccattgaagtatatttgtattctgaaaatatcataagatgagcaacaacggacataacatagaaaagacgaactttgacgcatttataaatgctgtcggttcggaaatacaacaggcgcaagtacggctgattaccgcagccaatgcgcaaatgctgttccactactggaaaatgggcaactatattctttatcatcagcaactgcatggatggggaagcaaaaccatcaaacagttggcaaaggctatccggctgaatttccctgaaaagaaaggctattcggaacgcaaccttacctatatgtgtcagtttgcaagaacatatccattgagagtattgcagaatttcattgaaacggatgcaaaactaatagctccaagtgtgaagaaaattgaagatgaagtacactacttaaacgattcgcaatttacgcaagaacctcttgcgcaaattcaatctactggtaacaaggaaattacaatcacgcaagaacctcttgcacaaattcataatgttgctaaaaccgtatccgacatttaccgtatggaaattaaggatatagaaaacgtatttatggcatcacctgttgcaaaaaccaattgggcgagccatgtgattatgcttaacagttcgcttccattgggtgtaagctattggtacatgaaacagtccgtagaaatgggctggagcagcaatgttcttaaaatacaaattgaaaccaatctgtatagcagacaaatcagcaacaacaaggttaataatttcacagtcacgcttcctgcaccgcaaagcgaccttgccaattaccttctgaaagacccatacatctttgacttggctggaactaaggaaaaggcagacgaaagggacatagaagaacaactggttaagcacgtcacccgttacttgctggaaatgggaaatggctttgctttcgttgcccgacaaaaacactttcaaattggcaacagcgatttctttgccgacctgattctgtattcaatccccctgcacgcatacatcgtagtggaattgaaagcaaccccattcaaaccggagtatgcagggcaactgaacttctacatcaatgtggtggacgacaaactgaggggagagaatgacaacaagactatcggattgttgctgtgcaaggggaaagacgaagttgtagcgcaatacgcattgacaggctacgaccagccgataggcatcagcgattaccagttgagcaaggctatacctgaaaacttaaaatcggctctgccaagtatagaggaagtggaggaagaactgacttcctttcttgataaagataagaacccataaaccaagcgtatatggcaggagaaatacagattatgattccccaatatggtgaactcaatcggatatacaacgactttttaatcagccatactttctcttttgacaggcagaaattcatcacggacttctacaagcaatacaataacacaaaagctttcgaagccgccatccttgaactggtgcttgacaaaccgaaggaacaatatactctagttctcaacagcctgagaaccgaaatagagaaaaacatactgatttacgaaaaacatccattgtttgataacgaggtaatttctcgtgtatgctacaacttcgcaggcagatatgacgctgatataaaggcacaattggaggttacacaaaaattaagcaagcctttgaatgaagcatacaacaggtatgattccattggctatagggtacatacggcagcagaagaaaagcaagccgaaaaggagtatgaacgctgcaaggctgaatatgagaaggaaaaaaaagaactggaaaggctttatgaattggaaaggcaggcaagaaaggaagctttccaatacattgagaactgttgcggagatatttataaactgagttttcattttatggaaatattggcaaaatatattcccgtagcaaaagacaagccggatgaaccgagcaagcaagagaaacagcaggatgcgccaaaggagcaacccgaatatttcgatgcagaattactttcgcttattcataaagtctgtgtgggggaacagtttgaagatattgcaacgcaggacttttatgccaacatgaacctctactcctgtaaaaaggaattaaaaatcaaggcacgagaaaaaatacgggtgtgttacctgatattcctgatgagtgaaagactgcccaaacaagacagggataaatggaagaatataatcctgaaacagttggatattgacgagaactactacaagtcaaagtacaaggaaccggtgtcggattttccaagtgacagtaaccaaaagttcgctaaagaaatggacgcaatattccgataatccgtgatatgtcctgacattttacgaaatcaccacttttaccactcaaattaatttttgagtggtatttttattatttgatattcagagaaataacaggatattccatttacaccaaccacatccttaccactcacgcccctacctaattttgcatcgttcgagaacagagataacagccagtgcgcagggctgattgtttaacggctaaatagattgaacgatgacaaatcttcaagagttattattaaaacccgtctggcagatgacaggcgaagagttcatattcctgagcaagcacgcttccggtcaaacggaaacgcaaccacgacccgttacggacacagaaagaaaatatgtgtacggaatactgggcattgccaaactgttcgggtgtagtctgcccaccgccaaccgtataaagaaaagcggtaagatagacaaagctattacgcaaatagggcgcaagattatcgttgatgcggaacttgcccttgaactggcaggaaagaaaaccggaggacggaaataacgggtggtatggctatggactatatgaaagagattaaggacatatcggcagaagaagccgtaatcctttggcaagcctcacgtttgagcctgtcgaaaagttatgagaaagcacccgaaatcctcaaagtgcatggttctgtcattgggacattgggcaacttcagcgcatccatcggcaaagccaaaagtaaaaagacattcaatgtatcggctatcgtagccgctacattgaagaatggcactgtgttgcggtatgtggcagagctctccgacgggaagcggaaagtgctttatgttgatacggagcaaagcccttatcattgcctgaaagtcatgaaacgcattttacggatggctggcttgcccgatgacagggacagcgaaaaccttgaatttctcgctttgaggaaatacacgcctgaacagcgtatcaggattgtcgaacaggctatctataatacgcccgacattggtcttgtaatcatagacggcatccgtgacatggtatatgacatcaacagccccggcgaatccacacgcatcatatccaaactgatgcagtggacggacgacaggcagatacacatccatacgatactgcatcagaacaaaggggatgagaatgcgagagggcatatcggcacggagttaaacaataaggcggaaaccgtattgctggtggaaaaggacaagagcaacggggatataagcagtgtttcagccatgcacatccgggcaatggatttcgagccttttgcctttcgcatcaacgacaatgccttgcccgaactcatagagggttacaaaacagaaagcaagaaaccgggaagacccgaggaagaaaagttcgacccttacaggcatatcaccgaacagcagcaccgcatcgcattggaagccgttttcgggctgaaagaggaatacggttacaaggaactggaagatgctttaatcaaaagctatacgtcaataggtgtaaaactgaaccatcaaaaggcagtaccgctcatcaccatgcttcgcaacaaacggatgatagtgcaagagaacggcagaaaatacacattcatgcccgacttccactattaacccgttacctgcaatcgcttcacttcattctgtgggtctatatattaaggataaagcgaagtgatgcaaggaatggataaaccgcttcactttattgccgtattctatatatacgacaatttagtgaagtggttatatagaccgtacttcttaaaatggtacgggcgaaaagaaaaataaatcaattcaccaactactcaaacaattatcttatggatatacagacagccaagcaaatcaggatagcagattatctgcacagtttgggatattctcccgtcaaacaacagggtatcaacctatggtataaatcaccgttaagggaagaaactgaagcctcgttcaaggtaaatatcgagcgtaaccaatggtatgattttgatgcgcccatataggctacacaataaatatctctatggcaagagattaggttagagttcaacagacctatcctcaacgcaagtacggtttgggggcaggtacgggaaaacctactgccgaaaggcagtaaggcgttctgtaccgagcctacgactgggtgaaggcggcacattgctcaccctcgtgatgcggttggagcggtgcgaccgttacgccgccatccgtatcctttcgaacggtgagataaggcaagccgggtctacttctctttcatcaggtatttacgaacgtccggccgttggagggccctcgccggtcgtgcgcccggctaccgtccccgcgctccgcgtcctctccgacgctccgcttcgtcatccggcattggtcggttatctcgcctcgcgcggcatcgtcccgtcggtcgccgctgcattctgccgcgaggttcgctacgaggtaaacggccgcgcctttttcgccgtcgggttccgcaacgatgccgaagggtgggagctccgctccgatcggttcaaaggcggctcctcgcccaaatacattacaacactcaaaggatgcaatgcaactaatgatatgaatgcagtcattgacagcagtgcaatcaatgcaaccaatgatgtcaatgcaatcacggattgccccgcaatcggtgcaatagcatcattccatgccggcaatgatccgatggcctgcgaatcggacagggccatgtcggcatcccatgcaagcgtcatggtcttcgaagggttcatagactttctctcgtatctgtcgcttgcgaataacatacatccggtcagcgatacggtcgtgctgaactcggtcgtcaacctttccaaagccgttccgtttcttaaccggcattcggtgatccacgcctttttcgacaacgacgaaaccggacgcaaaacgacctccgacctgcatcgtctttgtccccgcagcgagatcatcgaccaaagctgtttctaccgcagatacaaggatgtcaacgactatctgatcgcccgaaaaacctgtccgaagcccccggaaaccgtatccgacagtctgggtcgtgatctgcgaccttcgaaagcggaaacagcggcgattgagtctcagcgccggaaaggggtaaaggtttaaggaaggcaaggttgtgtttttgtcagccaaaaaccgctgccttcccgtcggtcggcagtcgatcccgctggtctggatattcgatcattattcttttcacctgaaatcgcaaacgaatggcaacaccgaagaaaccatataacagacagggcggccgtcctgtgctgagcaaatcccagcggcaggaataccgacttaccgtccgctacaacacggagctacatctccggctcaaggctctggcccggcaatcgggtcagaagcccgtcgaggtcgtgcggcagctcatcgcctatgggtgagtgaaggagcgggtaaagaaggaacaccgtccggtattcgacctgctgaaaggattgtccgacaacctgaaccagctgacccggctggcacacgccaaaggcatcgaacggctggagaaacagattgcatcggtagtgcaggaagttcggcggctcttaaaatatttgcgcgatgatcggtaagataatatcgggatcgtccttttcggggacggtaggctacgtgatgaaagagaaatcccggatattggaggccgagggtatcgtgcctccggatgcaaagcgcatggccgaggatttcaatgaccagactctcctgaacccgcggctgaaaaacaccgtcgggcatatctcgctctctttttcacccaaagacgctccacggatgaccgacgcactgatgacgcagatcgcaaaggagtacatgcagaagatgggcatcaccgatacgcaatacctattggtgcgccatctcgaccagccccatccgcactgccatctggtctacaaccgggtcggaaatgacgggcaaactatttcggacaagaacatcaagatccgaaacgccaaggtatgccgagagctgaccgagaagtacgggctataccttgcgccgggaaaggacgacgtgcggcgggagcggctgcgcgaacccgacaagaccagatacgaaatctacgatgcgatcaaaaggtgtctgccccgatgcgccggatggaaagggttggagaagcaactggaaaaacagggcatcggcgtccgctacaagtattgcggaaataccgatcgcaaacaaggggttctgttctcgaaaaacggtttcgaattttccggctcgaagatcgaccgggcttttagctttacgaaactcgaccgccatttcacctgcctgcagcaacaaaccctgcactgggctgcactcctcggaaacctctcggcggcggttggcaattaccgttcggcgtttgcagcgctgttcggcggcatgggcggcagtacgcgcgaagagcctgctgcacccggtcccggcgggaagctcgacactattccgctgccgccggccggttcgcccggcggggtgtcggccgaacagttgcagcgcaagccgggagaaagtcccgaagagtatatcgcacgcatcacggcactgctcaacgctgcggccgaggcgatggctatagctgcgatggaacacaggcgcaggttgcgcgaacagaagaatagacctcatgtaaaactttaacttcaatccagaaatgacaatgaaagagaataatcagatctccctgtcgtttgagatgtacgaagatctcaaagacacgcttgtcaaggccatcaaaaacaccaaggcaggtggcgcaggaaacgcaggtttggagaatgcccagctggaacggatcgagcggttgatagaggctgcggaacgctcgcaggggcaggtagcacaactgctggagcacctgcaacggcatacagcccagcccgaaataaaaaccgagcaggaacgggagatagttaacaaatatgatatgctgctgcaacagttggctgagagactggaggtgatcgacaaggaaaataggcagacgcatacgttgatagagcaggtagggcaagccgtcgaagcagcggcaatgctcaaaaatctgcctgtgcaggagcatcgacatacctatacgctcgatattaaatcctcgaaaaccgcgctggtaatatttgttatggcggtaataattgtcctccttattggttttatttaccggatctcggtaagcaatcagcagttggccgcaaatgatttgaaataccgctatatcaaaatgaaaggtgaggcgacgtccaagcgtatcgctgagctggaggagatttttgaactaaaccgcgacaacgcaaaaatccgccagatgaagaaggatgtcgaagaatatgaacaaaccattcaacgcaaagtccaattagaagaacaggcaagactgaaagaacgagaagccgagcgtctgaacaaaaatgcctcccgattgaaaaacaaataagccccccccctcctcccaaggtattgccgtcgaaagaaatccgcaaggtcatgcaagttgctccgcaaatcttgcggatattcttaccagcagtatcagctgatcgctaccaaaggaaatgactgaatctggacatcatgcaacctgcgattattactcctaaatcgcacgataacacctcatcatgttaacagttctatcattgttctgtcgcataatgagtgaatatacaatcattttactcaaaataagaatctggcgattaaatatattcggattatctaaccttaaaatatacaaaacagttcactgttcatggacacttgatgattgaatctattttatcaataattcttggcaattgggatttctgtatctcacattcccatactataataactctccatccttgctgctgaagcttcaatataacttctttatctctttgttgattgccgagaatttttgattcccagtattctatatttgatttcggcagaacaaaatgcttgcatccttcatgtccgtgccagaaacatccatttataaaaattaccgttttgtatttgggtaaaacaatatctggtctgccaggcaatttgttgacattgatccgataacgataccctctgcggaaaagttcatgtcttacaagaatttcaggcctagtattcttggaccgaatatgcgacatacagcgacggcgttgttcttgagttaatgtatctggcattttgatgcttattatcttttggtaaagatagtgattatttaaaaatttaggccggttgacaaacaacattctgcattctttggatgttattcaaatataaacgtttatagccctctgattttttattcagtcaatctccgtttatgaaaaaaatgtatctttgtaaaatacgattcagccgattgaatacattcagtgtgctgaagaatggtaaaaatatgcaagatgcaaactataaaatgatgaagaccaataaacagctgattggcatagacctttttgcaggtgcaggcggattaagtctaggtgcagaaatggctggcatatccatgcggtatgcagttgaagcagacgcttatgcagcagcctcatataaaaggaattttaagaatgcaaccgtattctgcgaagatataagaaaactttcagccgacaaattaaatactcaacctgtttttatcataatgggcggtcctccatgtcaggggttctctctttcaaacacaaaaaccagagatatgtcaaatccaaataacaggatgtttgaggaatttttgcgttttgttgataaaattgctccaacatggtttgtatttgaaaatgtatatggcctgacaaaatttaaaaacggagaggagaatatccagaatcatatagaaaaccgatttagagatattggctatacagtcaaatcaaaaatactatatgcttctgactttggcgtgccgcaacgccgaaacaggctgtttattgtcgggaatagaaatgggatagattttgaattccccaaagaatttgattattcagtttctgttgatgaggcaattagtgatttaccggttcttggaaatggagaaattcaaatgaagggggaatacacagttccttttgagcaggcgtctccatatgctcagctgatgagaaaaaagtcaaaagcccctacccaaaatatcgtatcacgcaataaggactatgtagttgagcgctataaatacatcggacaaggcgaaaactggtcatctatccccgaccgcttaatggagaattatgctgataaaaaacgatgccacagcggaatatataaacgattaatcggtggcaagccatctgtggtaatatcgaattatagaaaaagcatgcttatacatcctcatcaagatcgagggttgtccgttcgcgaagcagcccggctgcaaagttttccagaccatttcatatttgaagggcctgtatcatatgttcagcagcaaatcggcaatgctgttcctccgctgcttgccaaagctgttatgaagaagatattaacttataaataatattgttgcgatgggcatctataaagaaaatattcctaaagctgatatgctgatggggtcaatgcgctcaatgggctattctttcgagtctgcaatcgctgatgttattgacaacagcattagtgccggatgctcatacgtttcactgtttttcccaaccgattctttccaaaaacaagcagtgggcattcttgacgacggctgcgggctgtctcgtgaagaacttttcgaggcaatgtgctatggcagttctgcggcagaagcagcccgctctgaaaatgatttaggaaggtttgggctgggacttaaagctgcatcattgtcacaatgccgcatattgacagttgtgagcatgcaagacggagatatcagtgcgtattcgtgggactataattacatacttaaacataaaaaatggtttgttaacgaactgaccattgatgaaatatcaaatctgccgtacatagagaatctgcgtgaagcaggaaagactaatgacagcggaactcttgtgatatgggaagattttgatgtgttggaaaagtcgagtcatggacaggttttcagcactcttcgtgaattaagcgataaagtgcaggatcatgtggctcttatttttcaccgctatatctctgcgaagaagcttgttatctggattaacaacgcgaaagtaaaggcacaggatccatttcttgaaagcaatgctaaaactacgacaaaaaaagagttcgctattgcactgcgggacagccaaggtattgaacggctgataaaagtgcgtccgtttgtactgccttttggctcggacctaacagaaaaagataaaaaacttttaggcggtactgataatctgagaacaagacagggtttctatatttacaggaatcagaggcttattatttatgggacatggtttgggctcaaacgcagtgagctgacaaaaaatgccagaatacgtgtagacatccccaactctctggatgacatttggggcatcgatattaagaaacagaatgcttcaatacccaaatcaattcagaaccagcttaaaaaaaccgttgaagaagcaatggacatttctgttagaaaacagacgcatcgcggccgcaaagataattcggaagataatataagccacatttgggatagaatgcgcggcagaaatgatgcctactactatcagatcaatcgaaacagtccgctctgcaaatatgtgatggaacacattcctgacgatgcggcagacatcgtagaaactttgttgtcagagatagaaaaaggtattccagtacaggatatatacgtagacaggtgcaatgacgctattgttgcagcggataaaacgcaagaccttgaggataattttcagttgggagttacgctgatcgacaaaatgattaaatacggcagggagcttaatgacgctgttgatactattatgaaagccgaaccatggtgctgtcttccgcaactgaaagaaatgctgataaactattatacaaatgaagataagcagtgatgagttcaatgatctcattatggttatcaaacgccgcatcggggtcgacaagcgaaacgggaaaaccataaaatacgaagatattgactcctatatagataaggggcttgaatttattccaatcagcctgactgatgaggacagggcagaagtttttcgcgccatcgaaacagaagaagctataaaacacactaaaggcaattgtatattcgacgactatgatgatcctcacaattggtatgagcatgcagaaatcgaagatgagcatttctggaggctgtacagcaaatatcttctggaagaatcatcgcttgatgacaagagtatagacatcttggacaagaagactcttcccgccataatgaattgtctttgcaatccgaaagaagcgcatgaaggaaggcggttgattcgcggtttggttattggtgacgttcagtctggaaaaacagcaacgtattccggtctgatatgcaaagctgttgatgcgggttacaaggttgtcattttgctggcaggcataacagagaatctacgccagcagactcaggagcgtattgaccaaggcattgtaggccttgaaatcaagagagatgatataacaaaaatagagaagcccaagcgagtgggcgtcggcaaatatgacaaacagctgctggcatcgtcttatacaactcaatcatcagattttgtcggacagaaagacagtatttttgtgtcgcttgaagcacagcgttcagttgtattgtttgttgtcaaaaagaatgtatcagttcttacaaaattacacaactggctaaagtacaacaattatgatcattcagaggagtgcgttaatgcgcccttgctacttatagacgatgaagcggacaatgcatctgtcaatacgagcaaggatgaaacgaatccaacaaagacaaatgctattataagaaaaatttgcaatttgtttaaaaccgcatcgtatgtcggttttacagcgaccccatttgcaaatgttttcatcgacccggattctgttgatgaaatgaaaaatgcagatttgttcccggaacattttatatacacactgccaaccccctcaacatacattggagcaaagcagatattcaatgccggctccaaatattatcgcaatataaaatatatcattgatattgatgaacccgactacggagacggatgctggcgtgattgggctcgcacccacatcgatgagttgaatgcaggggcattttactatcggcatcagaaagaatggaacggaatccttcccgattcgttaaaagaggctatttattgtttctttttggcgaataccattcgagatttgcgaggacaaagttcagcgccaagaagcatgctggtgaatatgtctcgattcgtgaaggtgcaaaatgtaataaaagaagaggtagaacgtatttatgatgaattcaagagcatcgttgaaaaagatttcaacagcgattcttgcaaaaacacgaatctgcctctatataaagaattgaagcagttgtgggataagcattacagttttgtctctgatgtttcatttgagagagttgttagaaaagaaaaccttttcaaagcaattgagtgcataaaggttcttgttgtaaatggattaaaatcaagcgggaaactcgactacaaagaaaatccgtcattgcgggttattgccgtcggaggaatggcattgtcacgaggtttgaccttggaggggctgctgacaagctacttctaccgcaatacggctacttttgatgtcctgatgcagatggggcgctggttcggatatagaaaaggatatgaagatatcttccaaatatggacgagtgaagaaagtgcaatctggtatgatgagatttctatggcgtcagaggatttgaaggaagagctgaaagagatgtttgcacagcggctgacgccaaaggatttcggaattaaagtgcgcgacaattgtcaggagctgcaaatcactgctggcaataagatgaggcagtccttcaatctggatatacaggaatcctattacggcaatatatatgaaacaccgtatatcagtctgaatgcgactcacaacactcttaatcttgaacaagtgacttggctggcagaggagctgtttaagagaaacttgtcgtttgataaattcaaaaataatacatctctgatagtaaaagatgtgccgaaagatattgtagcggcttttgtgaaaaatattaaaagttcaaaggttaatccgagtttcaacactgaatatattctggatttcataacagatgaaaacacggtaggattagagcattgggatatagttttccaaagcggcgagtctgacaaatgttatgaaataccgcacatagcatctgtcagatgtgcagcacgcactgtccatgttgagaataatgctattgctgcaagctcgcggcgaaaattgctgagcactcaggaaggtgcttatggactatctgaagatcagttgaatttcgtaaagagaaaatgcaaagaacagtggagaaaggaaggtaaaaatgaaaatcgggaaattccaaatagagcatactttgagcatttggcagaccgaaaacctctgttgataattatgctcatcgagcctgtgaggaccgagggaaaagatgaaaagaagaagctgtctgaataccgggaagcattggggggagataaaatggttgcctttgccataggattcccaggagtaaaaggtgctcaaaatataaaacattacaaggcgaacaaaatatattatcagcagtttatgcaggatgagtcagaagacattgaagacaatgaaacaatacaatagccaggatatatacggcattttctctgaaggatttgaacaaggcttttttaaaagagttggaacagccagagatcttgacacctatataggcaaagacgacaaaggcagatatgctttcaagttcaaaggacagtatgttccaacacgaatctttggctccgaggtaatatctgtcgagcaatatgaggatgataactcatattcactgattttcttgcttgagaaagaagaactccttgaacggttctgcacattctgccaggatcttctgtcttctcttaacggaataactgaccaggttgaaggctatcgggccatatgcaacagatacgcatcatggaagcgtctgttcaaacccaatcacggagacttgactgaaccggaaattatgggcttgatcggggaaatgctatttttgaaaaacgaaatgattccaatgtatggaacagacaaggcagtagacagctggaccgggcctgaaaaaaccagtaaagatttttcaatagacagcatctggtatgaagtgaaaacagtcagcgcagggaaagatgctgtgcgcatctcttcaattgagcagctggatagtaatgttgacggctgtttggctgtatacaaacttgaaaaaatgagccctggatataacggcgttaaactcagctctctcgccaatgaaattatgacattgataagcagtgatttctacaaggagatgtttgcaaggaaactaatgtcatacggctttgactggtcaagtgattacgataactttgtatattcacaaagctcatttgccaagtatattgtgtcagaaggattcccgcgcattatgcggaatagtattgcactgccaattataaaggttcaatatgaactcatcctttcaaatttagaagaatttaaacaatcataacaagcacaccgcaatggagataggcgaatttagaaaacagtttatggagcagctccgctttgatgccgaacatgaaggatcggcgcctgaggcgcagtttatcagcagagcactggaacttctggaagatataggagatgtttctgatcctatgcctatgtccatcgaaatgaaggggcgccgggggcgcataatgtcttttgatgcctatgcttatgatgaagctgatggagcgctggttatgattgccagtgattttgtcaatgaaatcgacaatattcctacattaaccaatacacgcattgatgaattattccttcacatgaggaattttattgaggagagtgttgatggtgatatttctgcatattgcgacgattcagaccaagccattaatgttgcaaaggagataaaaacaaaagtgggcaaaagtatgcttgctaccgaaatctcccgattcaagtttatcattctatccaatgccattctcagcaaacaggttaaaaacgtcagccgcgaggaattcctcgaaaggccggttgaactgaatgtgtggacaatagagcgttttcatcagacatatgcctctaattccagtgaaatcattgagattgcaaccaaggattttgattgtgacggcattcagtatctcaaagcagacattggcgaggatgcgaactatgatgcttatctgggtattgttccgggagagttcttggcaaagatttattgcaaatatggcagcaagctgctgcagggcaacattcgtgcttttttgagcgtgagaggcaaagtcaataaaggaatacgtgaaaccattataaagcatccgggaaatttctttacatataataatggaattgctgtggttgcccgctcaatcggtttttctgatgacgggacaaaaatagtataccttaaagatccccaaataataaatggcggtcaaactacggcatcactggccaatgcaaaaatcaagaaagaggtaaaggacggaggcatggataacctgtttgtcccgatgaagctgacagtgcttaatgttgatgatgatatgtccgaggatgacattgaacgatataacaatattaccaaaacaatatctcagtgtgcaaacagccagaatgctgtgtctgaagccgactttttctcaaaccatccataccatgtcataatggaacaattgtcaagaaagaggatggctccgccggtaaatggcaatccataccagacaatttggttttatgagcgttcaagagggaagtgggagcaggaacaaatgcagctcagttccgcggctcgtgcaaaattttgtgagaaacaccctaaaaatcaagtcatcaaaaaggagaaacttgccaaatgcctcaatgcatttgcaatgaatcctcatgaggtatgtcagagttcggctattaacttctcccgattcgctaaaacgatcgacagtctgtatgaaacctccaaggagagtatcaatgaggtatatttctcaaaatgtgtatgttctgtaattatctttgattcgctggatcgtcgcatcaataaagcagactggtatccgacaggaggtaataaagctcaaataattccatatgccatagcaaaaatgatggctatgattcccaagaacatggatcttgactggaaactcatttggcaaaagcaggaaatgtacccggctcttgaaaaggagctgatgaaactggcacatattattcataatttctttgaggaggaagcacaaggcggattggttagaagtatggcccgtcgtgcagatacctggaataagtgcaaaagtttgccgctgtccttatcggatgagtttgtgtcaaccttaatctcaaagaatgagatgaagcaggaagaggctgccgcaaaaaaagaaagaaaattcagccataatatagatgcctcagttgaaatatttaaattgggagctgattattggactaaagtgtgcaatgatttatcaaaggaggatatgctgccatatggagatgtcgcatttataggcagtatcgcagagtatattaagcgaaattctctgccgtctgccgcacaatgcaaacgcctcgtcaagattattgagaaagcagagaaaaaaggatatattatgccgtaatattttataatatatcaattcaattagtacacctttaagcatatttacagcaaaacctgtgaattatactccaaaagcggaaatctaatatgaggcataatacaaaacagcatcattaaacattaaactttttgaagataacagttgtagaaggggggggnnnnnnnnnnnnnnnnnnnnnnnnnnnnnnnnnnnnnnnnnnnnnnnnnnnnnnnnnnnnnnnnnnnnnnnnnnnnnnnnnnnnnnnnnnnnnnnnnnnnnnnnnnnnnnnnnnnnnnnnnnnnnnnnnnnnnnnnnnnnnnnnnnnnnnngcaggtctcaatttttgtcgtcccggacaaattgcggacacggtgcggacacagaaaatgcaaaaccccgtcagaggaaactctgacggggtttctggtgcccaggacaggagtcgaacctgcacgcctctcgacacacgcacctgaaacgtgcgcgtctaccaattccgccacctgggcatcatggaattacggtgtgcaaaagtaatacttttttcttaaatgcaaatattttggggcgattttttcgaaaaaaactacttgttgaagtatttatagtgaaaaatcagcagataaaccacggctaccgagatataagcatcggccaggttgaaaactgcaccgaagaagtagttgcggctatcgaccaggaaatcgaggaatccgggaacgctgttccactgaaagagcggaaagtagaacatatccacgactttgcccatcatgaatcctgcgtagtggcctccgaaatgggcgaccgtgtcgggtgtggaggccgagaagatcagcccgtaaaaggcgctgtcgatgatgttgccgatcgctccggccagaatcagcccgaatccgatcaacactcctttgggcgcttttttgcgcatgaaatggcgaatcagccagatcagtgcgacgaccatgccgatccggaaaagacctaaaagcagcttgccccagtccatcgttcccggcgtggcgatgtgcatgccgaaggccgcacctttgttttcgatgaagtagagctgaaaccagtccgggatgagtatgatggcctctcccagagtcatgtgggttttcacccatatcttgagggcctgatcgaggatcagcagcagaatgacaaggagtgtgagtttttttccgttcatgacgcttgttttggataggggcaaatttacttaaaaaaatcggttcttgacaaaaaagatagtttgcgggtttcgattattcgtatttcctaaaaaaatacttacctttaatggctgaatttgccatcttatagtatctgccgtgtgaaaatccattcgggatatttttgaaatcctattcgaaatgaagtggaaaatggatggcgggttctgagagcaggattgttgaatgtattaatttaatggttatgaaaaaagtttattggactcttgtcgcaattttcgttgcggccgctttaggtggatgtgtaaatgatccgaccgaaatggagaatgcgccggacatgagcgccggaagtcgtaaaattcttacctcggcggaagcggaggcgggtgagttacttgtgaaattttcgaaggagtcgatcgctgctgtcgaggcgggagtgacgcgttccgaatctacgcgtacgggtattcaaccttttgatgcggctctgaaagaaattagtgccgtatccgttgagcgggtaatccctgtggttgagcaacatgaggccgacgctcgggcttcggggttgcaccgttggtatcgggtgaggttcaacgatcaggtgtcgctggacgaagcagctcgcaaattggccgctgtcgaagatgtagaggttgttcaatatgacggatatgttgcccggaattttacggaaatgtcggctgtaccttataataatgtatggagttcggatcgggaccaaattaatacgcgtagcggagaaactcccaaattcaacgatccgatgttgaataagcagtggcattataagaatacgggagatgaaacgctggtgagtcctattaaggagggatgcgatatcaatgtcgaacccgcatgggaattttgtacgggcgatccttcgatcatcgtcgccgtcatggatgagggggtaatgtataagcatgaggaccttgcagccaatatgtgggtcaatcaggcggaattgaacggtcagaagggagtggatgacgacggtaacggatatgtcgatgacgtctatggctataattttgccaaagaccaaggggatataacgtggacggatcccgaggatagcggtcatggaacgcatgtggcggggacgatctctgccgtgaacaacaatggtatcggcgtctgcggtatcgcgggcggcagcggaaacaacgacggggtgaagattatgtctattcaaatttttgccggacggtatcagagtacgataagccggaatgttgatgcgatctattatgcaaccagtatgggggcttctatcctgcagtgcagttgggggttgatgagtggtgcgatcaattcggatgaacagtatttggacgaaagaagtattgaagccaatgcgttcgcccattttattaatacgaaacgtccgggtagtccgctcaacggcggtattatcatttttgcggctggtaatgaagcaggagcctgtggttatcctgcggcatatccttcggtggtttgtgtgacttcgctcagtacggattttacgccttcggtctttacgaattacgggatgccggcagatattgctgcgccgggcggtgatctgtattatcacaaaaatcacagtgatgccggtcaggttctttcgacggttctgaaattggatggtatgtatgcctacatgtccggcacgtcgatgtcctgcccgcatgtttccggtgtcgcggccttgggtctttcgtatgccaaacagttgggtaagacgttcgaaccggatgagttccgtgatatggtactggcttcggtgaacgatttggatccgtatctgaccggtgtcaagaaacataacaacggtacgatgaacctagtcgagtataaggggaaaatgggttcgggtatgatcgacgcctacaagatgctgatggctgtacggggtactccggcgatcacggtcgagcaggacaagccgacgacgatttcgctgtcgaaatattacggggatgttactgcactttcttgtatgctggaggtgagcgatgcggtgaaagataagttggggcttacgttcactgtcgagggtaacaatgctacgattacttgctcaaagcagagcgccggtcttgtgacggttaagagctctgtcggtggaacgtcgatgagccgcgaggttgcgatcatttgccgtgcgaaggcggcttcgaacggcggttggctgtaagcctctcgttgattgaaaaatggcggagcgactgtatggtcgctccgttttttttgattatatattcaaaatgcaaccggctctgtgctgggccgactgcgatgtatgcttcgacctttcctcgatgctcccttcttgaagattgaggtagaaccgaataacggcctgtgggttgtgggttatcgttgaaatcgaaaatatttcaatgtatcggtatccgacggttgcttattcgccgcatgcggctatgtgtgtaattcgactctccctaaatttttcttcggagggaatttgtccgttatactttcaatgagggacacaagcggatataattatatctattataaataggtatctggatgtaaatggagaaaaattacatttttcgatataaaaatcattaaaacatttgcagattccaaaataatccctacctttgcatccgcatttgagaaaaacagttgctcgaatagaagtttaatccggttttcggatgacggagcaaaaaaggaaaatgcaaaagttcttgagaaaagatttggtggattgaaaaagattacatatctttgcagtccgaaacgtgatggaaaatcacggctctttttgagattggttctttgaattactggtaatattgagagaaaaagaaatgtagtatttatctgtcaaattcctttaaggaaattaagtagtcaggactctaacaaaacattattctttatacaatggagagtttgatcctggctcaggatgaacgctagcggcaggcttaacacatgcaagtcgaggggcagcatctgtagctaagatatgaaatttttatcacattgacaatcaatttgttataattttaagcctatttcgcgactgtccctatttacggtagcgataccggaagtgctttcacaaaaaatcattaaccagtatgaaaaaactaacgcttttgttggtgtcttttttcgcggttttcgctttgggcctcacgggttgtagcgacgacccggatgtgaaacaggagacaccagtcattaaggcctcgaatcccgcagacatcgcagccgttgcgggtaaggtaacagtaccttacaccgtggattatgccgtagatggttgttctctcgatgtgacgtgggatgcgacttggctgcacgatctgtcggtcagtgcagataaattcactcttcaggcagacgccaatccgggtgctgcgcgggaagctaaactcacgctgacttacccggaggcaacgagtgtggaattgacggttcgtcagatgtctgcttcggagtctatttcgatcagtccgaagaccttgtcgttctcgtacaagggcggcgaggagactgttaccgttaccagttcgaaatcctggacgctggaaggtagcgcagattgggttgaggcggacaagacggaaggcgaatctggcgagagcgtcgtgaagtttacggtttctacgaccaatgagacagatgcggccaaggaggtgacattcaatttcgtaagtggcagtgagaaggcccctctcaaaatccagcagaatcaggaggggaagctcatcatcgacgaggattcgaaaacgatatctgtgtccaatacggagcagaatgtaacggtgaaacttcagacgaacatcgagcctgtgacggctacgatcgaggagggagtcgattggatcgaggctgtggatacccgcgctatgatcgacaaggagttctcgttcaaggtgttggcgaatacggagggtggcccgcgtgacgcgacgattatcttcaagaatgcagatgcttcggagcatatcgtaatcaagcaggcgggcaaggaactgacctatcctgccgtgattcccgataaggtgctgaagacctacatcatgacgaacttcgatacgaataaggacggtgagatttcgaaggaagaagccgaagcggtaaaggcgatcgagcttacggggtcggagatcgcatcgatcgacggtctggaatatttcccgaatttggaaacggtcgatttcactacgcaccgtttgttaaaggccgatttctcgcagtgttatgctttgaaggagcttaacctgagcagcggcgccggcctttcgtcggtcgtgcttcctgccagcttggaagaactctccgttatgtcgtgtaataagctcaaaaagatcgatctttcggttgcacctaatttgaaaaatctctatgcttcgagtgctggtttcgtggtcgctcccgatttgagcaagaacaccaagctggaaatcatcggcttcagttcggctaaattcagtacgatcgacgtttcgaagaacacggaactgaagtcgctgaatgtcggcggcgacgtgttcaacagtttggatgttacgaacaatacaaaattgacaaatttggcggtaacgggtacaattacaacgctcgatcttacgaaaagcgcacagttggaagttctgaatatcagcaacaccaagatttcagagatcgacgtaacgaactgtccttatctgcgttcgatcgacttcggcagcaccccgatcgtcgagatcgacctttcgagaaacctgctgctgacttcggcattggcatatatggcgaactccctgaaaacggtttggttgagtaaggggcagacgatcgagagcacgtcgaatatcgagagctttatccaatacaaggattatgaggcagggccggatgctatcgctaacatcgaagacgaagcgtataagacttatctgctgactttcgataagaacggggacggtaagctcgacaaaaccgaggtcgaggcgatcaccgagatcaatatcaaaggtttgggtattaagtcccttaaaggtgtggaatatgtcaatttcacgaatgtgcggaaactggattgctcggacaacgagctgactgagcttcctgttgccggattcttcaccaatctcgaggagattgatttttcgaacaatcaactgaccgggcgaatcgaactgaataaatgtaagaagttgcgtattctgaaaggtagcggcaatatgctcgaggaggttgctttcgaaaactcggtattggagtctgtcgatttgagtaacaaccaactgacccgcttccagtgttcgtataatacgagtactttgaaaagcgtaaatgtggcgaataatttgttgagcgagtcttccggtttcagttgttccgacaatgcggttcttacggattggaacgtaagtaataacaatctcaagtatgtttatctccattcgactccgatgttggagaattataatgtcagcggaaatccgcttgtggaacttactttgtttggtgccggttacgggacagctttgaagacgctcgatgcgagcaatactgcattgtcgagtctggatatttcgggtaatatgtcgttgcagtctctgaatgtaatggggtgtgcgacgctgaccaagatatttgccggaactctcgacgtggaagctatcaatatcgagaaggagagctatacgattatcgaaacgagtacgattgtcgatgcgatcaaagataatgcattccgtgagttcctgattgagacctatggttccaatgggggtattacgcaggaggaagctgatcgggttacggatttggagcttaatgccgacaatgcggcggaagtgaagtctttggctggtatcgaatattttcggaatttgaagacgctgaaggtgtctgggttggagtctttggatgatacgaatttggctgttggtaatatcaatttgacttcggttgatatttcgctggagaagggtatgaattcaattaattgcggcggtcttaagaatctgacctctttctcgctggtggttaccggcgcggcaggtacggaggtcggtccgcagcgtgttgagttgagtggctgttcgaaggttcagtccgtcacgataaaggattgccgagctctggtatctgtggtcgtttcggattgtgcggaacttacctctctgaatctttctggttcgtatctgaaatcatggcttgacgaagaggagaatgtgcatactccttcgctcaatattgtttccaatacgaagttgctcgatcctaccaaattcattccggcggataacctggctgaaatctgggctacttcggcacaggtcgaagcattcggggagtacttcaagacgaattacaactggaatggtaaatggcagaccgttaataattaagtgatcgcaggcaggggcgggcatcggactcggattctgccggatcgctaatcggaatcccggtcggtaaatgccgaccgggatttttatacaggtgtatattcggtctaaggagcgaatctgcaaaagtgtaaattatcaaaatgcctatttgccgtggatcgagggagaggatgcgggtgcaggtttcttatgtcggatttttatttatctgtatttgggtgttttttagagggttatccgagtctttaacttcgttttgaatactccgcctcggcaaaatgcaaataaatttgcttttgtacccggcttattcgtatctttgcaaagatgcgcgaatcgaggccgtgtgtttcgttcgtgctgttttgtaaaattccgttaaaccgacgacctggtgcctatgaagacccgattgagtgcaatttgtttgactttaaccgcaacgacgatgatttcctgctatgaaaagaagacggaggatgctccttggatcctggaccgcttcgacgatattaaaattctccgctacgaggtgccgggctttgccgagctgcctcttcaggagaaagagttgatctactacctggccgaagccgccaaatgcggccgcgacatcatgttcgaccagaatttcaaatacaaccttcccgtgcgccgcacgttggaggtgatttatgagaattacgacggtgaccgtacgacgcccgaatggaaagcgctggagaagtacctcaaaaaagtgtggttcgctaacggaattcatcaccactattccaacgacaagttcgtacccgaatttccgaaggagtatttcctcgcggttgccgagtcgatccccgtcgagaagttcggcgatgagctcaatgcgctgcgggctgtcgtttgcgaggcgattttcaatcccgaactctataagacccaactcaatcaggccgaaggtcaggatttggtgacgacttccgccaacaactattacgaaggcgtgacacaggccgaggccgaagatttctatcgtgccatggccgatcctgccgatcccgaaccggtctcctatgggttgaattcgaagctcgtgaaggatgaggacggaacgatccgcgagcgggtgtggaaagtaggcggtatgtattcgccggcgatcgagaagattgtttactggctggagaaggcgcaaggcgttgcccaggagccgcagaaggcgaccatcgcagccctcatcgactattacaaaaccggcgacctgcacgatttcgaccgttataacatcctgtgggtgcgggataccgtatccaacgtcgatttcgtgaacgggtttatcgaagattacggcgacccgctgggacgcaaggcgtcgtgggagtcgctggtcaatttcatggacaaggaggcctgtcatcgtacggaggttatctccgagaatgcgcagtggttcgaggatcattcgcctgtagattccgcctaccggaaaaaggtggtcaaaggggtttcggccaaagtgattacggcagcgatgctgggcggcgactgttatcctgcgacaccgatcggtatcaatctgcccaatgcggattggatccgcaaggagcacggttcgaagtcggtgaccatcgacaacattacctacgcttatgctcaggcggcgcatggcgacggattcctcgaggagttcatgctgcgtcccgaagaccgtgaacgtatcgacaagtacggcaagttggccgacgatctgcataccgacctgcatgaatgtttgggacacggttccgggcagttggctccgggtgtgaagggcggtgagttgaagaactatacctcgacgctcgaggaggcccgtgccgatcttttcgggctctactacctgggcgatccgaaaatggtcgaattggggctgattccgtcgctggatgtggcgtatgcggaatatgcccggtatatcatgaacggtatgatgacgcagctcgcacgtatcgagccgggcaagaatgtcgaggaggcgcacatgcgcaaccgcaagctgatcgccgaatggtgctacgagcaggggaaggccgacaacgtgatcgagtggatcgagcaggatggtaaaacgtatgtcgtggtgaacgattatacgaagctgcgcaagctgttgggtcgtatgctccgcgaggtgcagcgtatcaagtccgaaggcgatttcgaggccggcaaagcactggtcgagaaatatgccgtgacggtcgatccgaagctgcacgccgaagtgctgacccgttacaaagccctcgatatcgagccttacagcggttttgtgaatccgcagtacgagctggtggagaagaacggcaaggtcgtggatgtgaaggtttcttatccgaacgactacgtgaagcagatgctcgaatacagccgggattactccttcctgccgaatctgaattaagattgaacgatacattgaaatcaggggaaactggtacacagtttcccctgattgtttttctgcggcgaatggaaaatcgtaagatgcgttaatgtaggccggattgtcgtgtatcgtatttcgaattcggaattcgtgcgtttatcatcccttaacatgcagatactgatatacacaacatagcatccttttggggaaggtaatgaatcgagatccccttcgggaagagaatttgggagaggggggggagaagtgtagaggccggtgtcttttgttttgacgtcggaaggtggaaactatcgtgtttccgtcgtttcctgggactgtagctcctgtgctcgtcgttctcgggcgtgcgagatgagttcccgtaggtcgtttacgagttcttctccctgggtacaggagacatagatccgattttcatagatatcggtgatttcgacgaaattccgccattcggaagcgtagattttgaccctttcgagatttttcaggtcgaaatagtgtccgtagaacccgaaaaatccgtaaccgccgaaatagggcacgtagcctcggagttcctgtttctcgacctgccgtacggaggcgatctcttcgggatgaagctccgtgatgtcgagcagacagaggatatgcagtccttcgtcgtccacgaggatgcgacgcggaatggagagcgacatcagggcgatgagcgccacgatgaacgaaaagaaccaggccgaaagatagcctccttcgtatagaaagtagagaccgatgcccagtgcgaggaagatcgcgaggtagatcgtcgtgagcgaaagcgtgtggcggctgaagctgtatttatagattttcttcacgagatgctctggatgaaaggattgcttcggcgatcggaaggtcgtccgctgtcgtgattttcaggttgccgcgctctccgtggcagagcgtgaccgcatgtcccgcccgttcaacgaccgaggcgtcgtcggtgaagtcgggggagtagtcgagttcataggcacgacggagcaattccgcgtcgaagacctggggcgtttgtacgattcgcagcgtattgcggtcgatcgggcgcgatccgtcgggtgtgagctgccgcagggaatcgacggcttcgacgaccggaatggccgtaccgtgggccgccgcacactccacggctttcaaaatcaggtcggacgataccagcggacgtacgccgtcgtggaccgcgatcagtgcgacggttcggggcagagcggacaggccgttgcgtaccgagtggaaccgttgcggcccgcccgccgtgcaggtgtgcttggctatgtcgaaacgggctgccagattcttccagaaatcgatctgtccttcgggaaggacgacgacgatctgcgtgctgtgcagcgtttttgcaaaggcgtttatcgcatggcccaataccggcagcgatcccagcatgcggaattgtttgggaagcggacctcccaggcggctgccgctcccgccggcgacgatgattactcctgttccttgctgttccatatcagtttctttccgaatccgagggtattgtccgtgaatttcatgtaggaaatctccacaacccacaacgtcagctcggcgagtgctgcgaacgggaagcggcggatatatgtttttcgtgcctcttcgtccgcttcccgcaccgttccgcaaagctggagcccctgaagtttgcccactgccttgctttcgagcgcgatgcccagcgctacctgccggttcgcctgcatctcctccgcatggcgcgtcgtcttatcggccgcgaatacgaacagattgcgctctgggtcgtaggcgtaaaacgcgtgcgagcaatagggctgttctccggcgacggtcgccagtgtcaggacgtggtgtcggccgataaagcggacaatgcgcgggtcgatcataatttactgctgaaaaccaggctgtctgccgttttcgacggggtgagtacgatcgagtcgagttgtttgatcttgtcttcttcctttacctcgccgtccagttcggccataattcggtcgcggacatattcgtaagcggcacggttggctttgtgaatcggttcgcccggttcctgcggaattttcagcgggtcgatcggtttgccgttacgccagacgcgatagtccagatgcgggcccgtcgatgctccggtgctgccgacataaccgattaactgcccctgcgatacgcggctgccctgacgaatccctttggcgtagccgctcaagtgcagataaccggtcataaaaccgttgttgtgtttgatcttgagggtattgccgcctccgcctccccagcctttgaagatgaccgtgccatccgctacggcgtgtaccggagtacctttcggagctgcgaaatcgacgcccgtatgggctcggtaggttttgtagatggggtggagccgcgaataggtgaaccgggagctgatgcgcgtatatttgagcggcgtgataagcatcaacttgcgcaggctgttgccgtcctggtcccagtaggcgattttattgccctggcggaacggaatggcgtaataggtcttgccgccgtagttgaatttggccccccatatacgcccgatgccggccggtagggtgtcgatgtaacgctcgtcgtagatgaccgtgaagttatctcctttctggatactgaagaaactgatcgtcgattgatagatgtcctccatttcggcggcgagggaggccggcatgccggcgcctacgatcgcctcccagagtgaggagtcgatcgtggcagtctttttctggcgacgtatttcatactctttttcacctttggtgacactgatcgagtcgtcggccagtctgaaaacgacatactgggaaatgctctgttcgtacaccagatagtccagatggggcgcgttgagcgaatcttcgtggatgaaagccgtgtagctgcgcccggcccggatgttgcggagcgggaatacgtctttggacgctttgtcgagctgatcgatctgggcggcggaaacaccgtatcggttcagaatctgaccgagggtttcgccacggtcgatgatctgctgttcgagccggtagttgtcggcgggaatgccgtataaaaggttgggttctatgatttcatcggaattttcttcggcatccgttgtcgtgcggccgcatcctgcgaaaaagagcaggcctgctaacaatgcgacagctggtttcagttgtttgatcatgttaataattaaggtataaaactgcgaaccgggtcaaattttttggagtccggtcgggatgtatcctgatttttaacggaagttttcttccggtaaagataagaaaaaaaacaaaatttccgctgctctgcggtcggattatccaagttttggggtgtttcttttgtaattcattgaattgttgctatctttgattgctataaaccagtattgagaatgtcgaatttttttttgatgcctgtttctttcctttataagttgggggtcttgttgcgccaccggcttttcgattgggggattctgaaacaggagaagttcgatattccggtcgtctgcatcggcaatatcaccgtaggcggtacgggcaaaaccccgatggccgagatggtgatcgcctacatggctcaaaggcatcacgtagcgttgatttccagaggatacgggcggcgaacgaaaggatatattgaggtcactcccgaatcgcactaccgcgaagtgggggacgagccgttgcagatcaagcgcaaatttcccgatacggtcgtggtcgtgtgcgagaaacgggcagaggggatccgccgtcttcggcaggagcatccggaggtcgatctcgtcgtgatggacgacggcttccagcaccgttacgtagagcctaaagtcaatatcgtcatgatcgatgcgacacggcccgtgcagcatgatcggatgttgcctgcgggcaatctgcgggatttgcccgaacagttgcaccgggcgcattatttcatcgtgaccaaatgccctgagaatatggctccgatagaccggcgcatcctgcgcaaggttctggttcaggtcgcctatcagcgtgtttactttacccgtttcgaaagtttccggcctcggccgctcttccctgagttcgtggatgaggaactgaattacggccagcaggtgatcgccatgtcgggtatcggcaatccgggacctttcgtggagggattgaggaacaattacaaggtgatcgaggacgttcgttttgacgaccaccatgtttaccgggtgaaagatatgaaattggtagcgaatttgctggcaaaacacccgaaggcggcgatcatcatgaccgaaaaggacgcggtcaagatgagccatcccgaaaagataccggcggaagtacgcaagagaatgtatttcctgcccatcaatatttcattcatagatgattcggaaacggattttctccaaaaattagagtgcgatgttagagagaattaaagagactgcggccttcattcaggcacgcatcgaaaacttccaaccggaagtaggcattattctcggtaccggattgggcgatttcgccgatcgtatcgatgagaaatattcgatcgactataaggagattcccaattttcccgtttcgacggtcgagggacataagggaaaattgattttcggtttgctcgaagggcgccgcgtggtggccatgcaggggcggttccactattacgaaggttacaccatgcagcaggtgacgttccccgtgcgggtgctcaagctgctcgggatccgctacctgttcgtatcgaacgccagcggcggcgtgaatccttcgtttcgggtaggcgatctgatggtcatcaccgaccacatcaacctgatgcccaatccgctgatcggccccaacatggccgagttcggcccccgtttcccggatatgcacaactgttacgatcagcacttgattatccgtgcgacccgtatcgccgaggagaagggaatcaagttgcagtacggcgtttacgtgggcggtacgggtccgacgttcgaaacgcaggccgaataccgttatttcaaggcgatcggcggcgatgccgccggtatgtccaccgtgcctgaggtaatcgtggcccggcacatgtcgattcccgttttcggggtatcggtcattacgaactgcgggttgagcgatgaggtcggcgaccacgaggatgtgcagcgtcagggggccaaagccggcgtgaagatggccgagctctttatggagatgataaaaaacttataacgaggcgatatggtaaataaagtgattttgatcggcaacgtaggtgtggatcccgaggtccgcacgctcgaaagcggagcgaaagttgcccgggttcgtctggcgacgaccgaacggctgttcgaccgccaggccaacgaaaccaaggaacataccgagtggcatacgatcactttgtggcgcggtttggccgacgtagtggatcgctacgtcaataaaggatcgcagatctacatcgaggggcgcctgcgtacccgcgagtggacggacaaggataacaacaagcgttatacgaccgaaattctggccgacgatatgaagttgttgggacgccgtggggataaccagtcggcgggagctccggcaggcgggtatgcccagccgcagggacagccgtcctatcagcagccggcgcagccttcgtaccagcagcctgcggcccagactcccgttacgcctgctgcggacgatccggacgatctcccgttctgattttccatactattacaattgaatatccgccgagacagtccctgcgaaaatcgtatcgttctgtccggcggatttttattgagtgtaaacttaaaaagtgaatatatgcagctttttattttgaatcgtacgaatgaacggcagaccaagagtgtcggccgcattttgctgtacgcgctgttgttctttatcgtaacccgtatcgccgtgatgttgatgcttacggggtgtacggcgatttacatggccaatacgggaatcaacccgatgcaggggctttcatttttcggaaatccgtccgtagcggctgccggcatgggatggtgggcattgccgtacgtgctgctcgtagcaccttttttcgaagagtgttgttttcggctgggactttcgttccggcggtggcaggtagcggttggattgggggcactgacgctctttttcgtctcgcggtttttagcgatagccggggcgcagcattctttctggtgggggcttccggcaggtatcgttgtagcggggctgctatatggatttactacagatgctttctggcaggctaagaaggggtggctgcgtccgatgatgtggtgctcggccggactctttgccttggtgcatcttttcgccatgcagggtcttacctggttcctggtgccctatgcgttactgatatgtctgatgcttttcttcgccggtagcgtcatggtttacctgcgggtcaacctgggtttcttgtgggcggtcggggcgcatgccctgaacaatgtgcctgcggtgtttatgataacccttgtgctgatgcagtcttaaccgttttttcgaatggaaatcgtacggtatgcaacccgttactccgggttttcgaacagtggctcgacaagctgagatatacccgttacggatttgccaaatatacatgcggcgaacttgtcgaaatagatcgtcgcgcgggattcgatagcgtagagttggtcgaaatcgaacgaggaaaattcttttatatccggtgcaagacctgacctccggcatggattccggctttcagggcatccactccgctacacccgtcaggggatgtgcttcgcgccagcgaacgaaatcggggtagctgcggatgccgtcccgcaggacggccatgtagtattcgatgcctgcgattttttccgtatcgggcgtttcccacttgagccgcaggatcgcctcgcgcgtttcatcggtcagggccgccgaaatgcgtcgggccacctcttcgaagtagccgtcgtagcgggagcctttctcgatatggatcatatccaactgccagagttcgccttcctggtcttcgtaccaagcgtgccattcgaggcaccgctcttccgtcgccagcaagttgccgtattcgattcgtttgacggcaggattggcggcaagcttcgctaaagcggtaaaatcatcttctggccggaggacagccgaatagatatggaagtcgatgtcccggtgcttcatgaaaagaccggtgctgagcgagccgaccaggtttatttcggctccggcggattcccagatgtcgatgatgccggtatctcggatgatccgtcgggctttctctgtgttgcgggcggcgatggcagcgatttgttgggatgtcattggggaaattttagaggtggatagctgtggcgggagcatggggtgtcgggagaaatcttgctgacgggccttatttcgtgcggatcggcagccgctcccagagccattcgggaatcagcctccagaaaaataccagcacggcgtaacggcggtcgatgacgatgcgccgtttccgttgttccagcgcccggacgattcgtgcggcgactttttcggggcgcatcagcatcgggtatttcccttcgcgcagcaggggtgtgtccacgaatccgggccggatgtcggtgatgcggatgtcgagccgttgcatccgtgagagttgtgccaatgcgtcgagataggtgttctggtagcgtttgctggcggagtaagccgccgctgcgccgaggcctttggtcccggcgatcgaactgatcgctgccagatgtcctccgccctgcctgcggaaatagtcgaaagccgtgtctatgatgcgcgtgaaccctacggtattggtttccgccgttgcgatttcccgtgcggcgtcgagctgcgggttgttgtagccgatgcccgcgcaatgcagcagcaggtcgcagccgcccagatcggcaatcagcagcagcagcagctcttccgcttccggggccgtgatgtcgatcgaacgtatttttacccggtccggcgccgcagcccgaagtgcttcgaggttttccgtgcggcgacctgcggctccgacttgccagccggcggcgatatacagtttggcgatctccagtccgatgccggaagtggccccgaggatgacgattcgattcataagtagcgagtgatttgtacgatcggcaaaggtaatacgattcgagtgattgagtgaggtcgttcgatttttttcatgccggggtcaaaaaaaaagctcgtttttgaaaaataatagaccgtttatgacaaattataaagaaaaaatattatctttactattgacatattattttattgtatcattttattcttgaagttctatgaaaagatttttattgctgatgctttgtctgagcgggttgttggcttgctcgaaggacaagacagaagatgttcctcccgttccgcctggttctgaggagatacccgataagcttgaattgaaggccggagataccgatttcaattcgctggcctataccgttacggccggaaaggacggcaatgaatacctgcacgtggtttacgataagagtttttacgatggagtggtcggagtattttaccagccggccgacttgttgcagaaagacggtaaacggggtacgggcacccagagttatacggtaaagaacggcgacgcttaccccgacggtaccacgatattcattctcggaaaggccgactatgtgattcttgctgctgtctgcgacgagaagggtgtcattaagggcgagataacctcggtgtccgtgactacgaaagaggtagaatactccaaggcgcagatcgtcgtcgagcaggatttggataagaccacttcgctggcgctggccgtgaagataacgcctgatgaggcggttgattcatattatgccgttcctttcgagaaggatgattatgagttgaattacaaggatatggctcgtccggaactgatgaagatgctgctgcgttacagcgaaccgcttcagggcgtgcagacgaaagtgtgggacgtcggaatcgctccgaataccgattattgcgtggtcgtttacggtatggtcggggatgtgcctaccgagatcgtcgaaactgtatgtcgttcgggtgagcctcagatggcattgccgacgatcgaggttacgatcgttccgggtgacggaacggatggatatgatcctcacaagagtctgatcgtgaccatgaaagcggccaatgcctcttcgggttactactatttcgacaccaagagcaactacgaggcgaatctcgaatacggttatacggatgaaacgctgcctaagaattacggcaatccgatcgattcggagagtattgtgctcatgctcgaacccgagggagcggtgaattcccatcggaaactgcacccggacacggagtatgtggtgatcgtatcagtggcgaataccgagggtagcgttgcgttggccaaagagctggctcggacggcgacggctcccatgctgccgccggtggagtcggaacttttcacgaccttgcagggcgagtggacggcgaccatgaccggacgtgtcggcggaatgggcggaggcatcgaggtttccttccccgtgacgattgccgccggagccgatgagcagacagcggcggactatcgggcgcagaaccgtttggtatgtctcgggttcgattatgacggagctttgccgtattttactccggaggatcttatggccggaaaagttccgggtacggagtcgtacaatccttgggaggggaatgaggttgcagcgcgtcaggactatggacccaagtggttcctcgaaattgcatccgacggaacggtgagtgttccggcagacgatgaaacgttgttccattacttgaagaactacaagaactatctgatcggtatgtcgggcgaaggaaattattacctgttcggcaagagattcgaggtcgaaatctcggaggatcttcagacccttacggttaaaggttatgaggcggatggtgcgatttactatccaagtgtgatttacgacggttacggggaatacggtatcgactaccagggtagctcggatattgtattgacgcgcaaggcggatgtcgctcgaaagggtgcaactgttgcgcggacggcttcgttccggagcaatcgcggtatgaagtcggaaccgcatccggtggtttttcagcgactctcgtcgttcgctcggatgaggtaagttgttgacggaattttataaaagatcgaggggagcgtagaatacgctcccctcgatttgtttgcggatagaagattcgtgtcagcggaattccgggcggctactcttctcctggaatctgtacgcattcgataccgacccggcgcagcaggtcgagtccctcttcggagcggtaatcgtcgctgtaaaccacccgtcggataccggcctgaataatcagtttcgaacattcgatacaaggggcggcggtgatgtagagcgtcgagccgtcgcagttgttggcgcttttggccaccttggtaatggcgttggcttcggcgtgcaggacataggatttggtcttacccgtttcgtcctcgcagatattctcgaagccggccggcgtgccgttgtagccgtccgagatgatcatcttgtctttgacgatcagcgccccgaccttgcggcgcacgcagtaggagttttccgcccagatgcgtgccatgcgcaggtagcgcatgtcgagctggtgttgtttctcttccttgtaacccatcgtcggtccgtttttgcggttataaacctttgccgtgacagttcttgtattttttgccgctgccgcagggacagggatcgttgcggccggcttttttctcgacatgcacgggcatcggcttctgtttttcggcctgtcccgcctgtgccgcagcctgcatgcgcgaagcctgcaacttgttgacatcgactttggctcgctcctggcgttcgcgctgtacgttctcggccgtattctcccgtaccgggatgtaggccttgttgagggtgctcaatacgtcggcattgactttgttgagcattttcgagaagagctggaacgactcgagtttgtagatcagcagcgggtctttctgttcataggtggcgttctgcacgctctggcgcaggtcgtccatttcgcgcaggtgctcgcgccatgcgtcgtcgatcgtggtgaacatcaccaccttggagaataccttgaagatctcctccccgtccgaatccttgcagcgctgcaggttcaccgggacgttgtagcccaggtgtccgtccgtgatggggaagtagatattggtgtccagctggcctttgcggtcttcataaacacgctccataacggggcgtaccatatcggcgatcgccttcatccggcgggtataggcggcctgcaggtcggcaacgatcagttcgatcagctcgcggggcttggctttttcgtacgccgcctcgtcgaacgaaggctggatggccgcttcgcggatcatttcgatacggaaatcgtcgaattcgacgccttcgtgattctccacgaacgtcgtggcgaagtcgtacatgatgttgttcaggtcgatctcgatccgttcgccgtagagggcatggcggcggcgcgtgtagatcacctcgcgttgcgagttcatcacgtcgtcgtattccagcaggcgtttgcggatgccgaagttgttctcctcgaccttcttctgtgcgcgttcgatggctttggtcatcaggcctgcctggatcacttcgccctccttgaggcccatgcggtccatcatcgaggcgatgcggcccgagccgaacagacgcatcaggtcgtcttcgagcgatacgaagaattgcgacgatccggggtcgccctgacgcccggcacgtccgcgcaactgacggtccacacggcggctttcgtgccgctcggtgccgatgatggcaagaccgcccgcctgtttcacttcgggtgtcagcttgatgtcggtaccgcggccggccatgttggtggcgatggtcacctggcccgaacgtccggcttcggcgacgatctgcgcttccaactggtgctgtttggcgttcagtacgttatgtttgatgccgcgcagcttgagcatgcggctcaaaagttccgatatttcgaccgaggtggtacccacgagcaccggacggccctgttcgacgagtttgacgatctcctcgatcacggcgttgtatttctcgcgcttggtcttgtaaaccaggtcctgacggtcgtcgcggatgaccttgcggttggtcgggatgaccacgacatccaacttgtagatactccagaactccgatgcctcggtttcggccgtaccggtcataccggccagcttgtggtacatgcggaagtagttctgcagcgtgatggtagcgaaggtctgcgtcgcggcttcgaccttgacgcgctccttggcttcgatggcctgatgcagcccgtccgaatagcgccggccgtccagaatacggcccgtctgctcatcgacgatcttcaccttgttgtccatcaccacgtattcgacatctttctcgaacatcgcgtatgctttcagcaactggatgaccgtatgcacgcgctcggctttgacggcgtagtcgttgattacggcatcgcgcttctgggccttttcctccggagtaatctcctccttctcgatctcggcgatgcgggccccgatgtcgggcaggacgaagaagccctcctcgttgaaatatttcgacagggcttcgtggcctttgtcggtgagttccaccgagttcatcttctcgtcgatgacgaagtagaggtcgtcggtaatctccggcatgcggcggttgttgtcctgcatgtagatattttcggtcttttgcatctgggccttgataccctgttcggagaggaacttgatcagcggtttgtacttgggaagacctttgtggctgcggtagagcttgatgccgccctcttcgttcttgccttcgccgagcagctggcgggattccgcgagcaggttggtcaccaggtttttctggaggttgtagaggtgctcgatggccgggcgatactgttcgaagagctggtcgtcgcctttggggacgggacccgaaatgatcagcggggtgcgggcgtcgtcgattagcacggaatcgacctcatcgacgatggcgtagtggtgcttgcgctgcaccaggtccttgggcgacgaagccatgttgtcgcgcaggtagtcgaagccgtattcgttgttggtgccgaaggtgatgtcggccatgtaagccttgcgtcgggcgtccgagttgggctgatggcggtcgatgcaatcgaccgtcagaccgtggaactggtacatcggccccatccattcggagtcgcggcgtgccagatagtcgttcacggtcaccatgtggacgcctttgccggcgagtgcgttcaggaacacggggagggtagccaccagggttttgccttcgcccgtcgccatctcggcgatcttgcctttgtggagcaccacgccgccgaagagctgcacatcgtaatggatcatatcccagcggacgtcgttgccgccggcgagccagtgcgtcgcatagatcgccttgtcgccctcgattttgacgaagtccttggtggcggccagctcccggtcgaaatcgttggccgtgacttcgaccgtttcgttctgggcgaagcggcgggccgtatccttcatgatggcgaaagcttcgggcaggagttcgtcgagtttctgttcgatcttctcgtcgatgcgttttaccgtttcgtcgatctccttggagattttctccttgtcggaaagcgacgtgtcgggcagttcgagacgggctttcagctcgacgatacgggcttcgtccgcagcgatgaagttggcgatctgttttttcaggttactgctgtgggcacgcagttcgtcgttcgaaagcgcctcgatcgtcggataaacggctttgatttttacgagataaggttctacttctttgcgatctttgtcggctttggatccgaaaaaaagcttgattaaactggcggctatgtccatattttcgatgttgttatttcgtgtggaaattaaatctgtcaaagatattcattatttcggaaaatacaatacgaatttgcctcgaataaggcggatttttcattcgctatcggcgtccgggagggtcgcctcggcatattccggacggaagggccgatatttccgggaatcttcgccgtttcctgggcgctgcgtgtgcggcgtgcgggattctattgtcgtttccgggggctttccggctgtaagcgggacttctccgcatcggcccggctgcggcttgtcgtcaccagatagacaccgctgaaaatcagcaatacggagcagattttggtcggatcgaatgtttccataccccaacatacggccactaatgtagcgaccagcggctggatgtagttgtacatgccggcgacggtcggacgcaggtttttttgtccgacgatgatcagcatgtaactcagaaacgtgctgccgacgacgatgaatgccagggagccgatcgctgctgcggaaagggcctgccaatcggtcgaaagcaggtcgcggccggtgaagggcaggatgcagagcgtggcgaaggtgaacatccatttcatgatggtcgtgagcgagtaacgggtgacgaaattcttgtacaacacgaagtagagtgcgtaactcaactgcgcgaacaggaccagcaggtcgcccgcgacggagtgccctccggcactgtccgtatttccgctgccgaggaccaacagcaaggctcccgaggctccggcggcgatgccgagtacctttttcgcggtgatcggttccttgaggaaaattgcggcgagaatcatcgcccacaacggcatgctcgtggtgatgatcgaggcgtttacgggcgaagtcatgcccacgcccaggatgaagctgccctggttgaggaccacgcccagcagcgatgcaccgaagagtttggccaggtctttcggcggtacgtgttcggactttcggaagaatgaaaggatccagaacaggatcatggcgcccacgatccgcaggtcggtgacagccagcggtgtaacgataccgccgagcattacgaatttggcgacgggggacatcagcccccaaatagcgttggcgccgaacatggcgccgtgtcctttccagttgatcgtctgcatgatttttacggtaattcgccggtcccgggaccgttgcgaatcggatttttttgacagttgtttttttatccccgccgtcagcttttcggattttgaaatccgaccgtcgttatccgcaggccgggctttttcccaaatgatttcctttgaaaaatcaggactgccggcaaaagcggaacagatggctgccggtgggaagcgtatcctcccgattattgcgatcgggtgattttatcgatgatccgccgcgcgacgggacaacattcgcaacgttgtgcggcgcaatattccctcgacagctggatcaacccctgcgtgtcgaatgcgttgcggggattgactccggctgcgatccacggcctcgtgtatttgttctcttcggcgggaatacattccagcagggcgatagcccggtcgcggagttcttcgttctggatgtaggagccgtaaacgtattgcaggatgctgaccacgttgataccgaagacatccgttttgtgctgtccgacccgcttggggttctcctccggtccttccggggtatgtctggctccggaccagtagggcgacgcttcggtacggaacaggcggttcacctcctggcgggtacggcaggccagcagttgctcgaaaacgaaatcatgctgcgagagaaacgaggccagttgcgcgatgcgcagccgcggaaggttgcccggtcggatattggccgttttccatgccgaagggtctatcggttcgatgtcgtatcgtgcacggaagtaggcgaagtcatcgcgcaggcgacggatgtaatcgtccggccgaaaggtgtcgagcagtcccgaggtgccgaacagcagggcttcgatccgaggcagcgaatgtctttcccgaagcaccatcgtataagtagcacgccgggcgagctccgtataggtgtcctgattggagaggtcgccgatgtagcggaacagcagcgtgtagaaggtctggttccagttctgccccgaaatacggtagatttctgcggctgcatcgtatttgcgccggagccggtcgtacaccagcccggtcagcaggtctgcgaggtgcagcggatcgagcgtcgtgaggaatccggcgcaggcatggccggcggctccggttcggagccgttccaggatctctgccgtttggtccgcgcggggttccaccggttacaacatgttgagttcgagcagcgcctcttcggacatcatgctcttgtcccatacgggatcgaacgtgaggatgacattgacgctcttcacgcccttgactttggcgacctgttgattgacgtcttcgaccagcatgtccgccatcggacagttgggggcggtgagggtcatgcggatattcgccacaccgtccggttcgtagtctatttcgtagatcagccccaagtcgtagatattgaccgggatttcggggtcgtagatattcttgagcgtggcgacgatatctttttctacctgtaaaatctcttctggtgtcatgttgcgtaagagttatttttttgaaaaagcgagcgcatagagccgcatctgcttgatcatggccagcaaaccgttgctccgcgtaggggagaggttggcgctcaggccgatggcgtcgatgaaatagaggtccgtgtcgagtatctcctgcggcgtccgaccgcccagcacccggataagcagtgcgatgattcctttggtgatgatcgcgtcgctgtcggccgtgaaccagactttgccgtcttcgtaacgggcgtcgatccaaacccgcgactggcagccctggatcaggtactgatccgtgcggtgctcgggtgcgatggccgggagcgtgtcgctcaatccgatcaggtattcgtatttgtcgagccattcatcgaataccgaaaattcttcgatgatctcgtcttgtcgtttgtcgtttgccatggttaaatattgcttgaaataacttcttcgagtaccgttccctccgaagccgccggagcctcgataccgagcagacggcagagcgtcggggcgaccgccgtcatatcgacggggcggtctatctgccggggaaggatgcctgcgccgtagaagatcaggggaacgcgggtgtcgtagccgtacatcgaacccgacgaggagcgtttgtggtcgtgctcttcgatccatcccggcatcaggttgatgatgacgtcgcccgagcggcggggatagaagctgttctgcatcttgcgggcatagccgctgccgaagtagctggtccgcatggccgtagccgagagagcgtgcgaaacgccccggaactgcatggcgaacgtggccacttcgttctgaatatctgccaggctgaggtctttctcatacacgaggttgtgattcaggtacaggcatttgtcttcgtactccaacacccagttgcccggtccgtagcgggcgctgagaaatccgtttacgatcacttcgaactggcgcgtattgaacctgtcgcacgcttcgcggccgaaatcgtaggaggggctgctgccgtgatccgacgtgagtatgacgagtacttcatgaggcttgaacagcgtataaacgtatgtcaggaactcttccagatcttgatcgagccggtagtacatgtcttcggcttcgatcgattcggggccgtaggcctcgcggatcgcacgcggggcgtcgaggcagatgttcagcaggtcggtccggtcccgtttgccgaggtcgagttgtgtcagggccgttttggcgaattgaagcgtcaggcagttgcctgccggcgaatacaggatgttgtcgtagcggctttcggaaggggctttcgacgagatccgtttgacggcgtcggccgaggtgtcggccgaacgctttttcttggccatggaactcatcaagacgatgtccgaacagcgtttgttgcggtatttgtcgtcgttcagcagggagtgccacggttcgccgatgtaagaaaggtagagtttgtccgcattgaatcttttgacccaggccggtaaaacgggcaggtagtaggtggaggtggtccagttgcaggaaacgctgtccatccagaaggtcatgccttcgcgtccgcccatcaccacggccgaaatcgggtcgagagctacggttaccgaccgactgtcgggagattgccggagcagggcctccccgacggtcggggcgatcaggttgcggggcgagtaggcgccgttgccgtggtagtattcgggatcgcggacgctggggtcgtcgatgagcccgaccgttttattgacgatgtagtcccgccaacgggtcgaaatcacgccatgcgtcgagggcatcgctcccgtggtgagcgtggccagcgatacgggggtcgaagtttgctgatagtcgtaggaaccttccgtgaagcgggcgccgccctctgtcagacgcagaaatccgcccgtgccgaactggctccggtaacggtcgatgtcgtccggacgcatggagcttacgactaaattgatgaccagacggggcggagtgtttgcgaggatcggcagaacacccggcagcaggagcaggacgagcaggattttcttcattttttcgcgtgtgactatcgaacggcaaatttatgaatttatttagtattttcttcatttgttttgtgccgtccttcaaaaaaagaaatcgaatgccggagccggatttcattctcggttttccagcagtgcgaaaaattcgccggcctgccgtccgtcgatgaatccgtggtgtacgtcgagcgatacgggcatcgtaagccgatcgccggaccgggtcagtttcccggtggagatgcggggtatggagtcgcctcgattggccgaccgggcatgtttcatttccgtaaaggcgaaccagggaacagccgaaaaatagatcagatccgtgcgcccggctcccgctcccagacaaagaccgtccgctgcctttacgcgttccgtttcccgctcggccgcccggatgaattcgtgcaggtcggaaaagtactcgaagaacccgtagccgaagctgccgtcctcgcgtccgatagtcgggctcgcgtggattcggtcgtaacagaccacttccccgttttcgatccggtatcggaatgcctcgatccggtttacggccgttagaatacggtgcagggaacagaggaagaacgaagtacgcctcttcttggcttcgaggtagcactccgtaaaatcgaccggaacgaccgttccccagaagggatcgtccattccgttgaaaaattcataatgttcgcgtcttttccaggtcgtcgtgtcgattttgtacttcatatcgtttttatagaaactggttgaaaaattctttttcccggctgaggtctatttctggaagcgattcaatgatttccagttgtttgcggcagaatcgacggtattcgtcgctttcggggtgtagcggccggtggccggcggcggtcgtcaaggcttcgacttgcgggagttttctgcgggcctcctcggtgagggtcgctgcggtgaagagttcccagatgtattgctgtgcctgttgcgaggggtgtaccagatcgtcggcataaaaacggtagtcgcgcaggtcgtccgtgaggatttcgtaggcggggaagtaggccgagtctgcatgtcggcggcagatttcgtcgatggccaggcgaagggtcgctttgctcaaaaagttgtcgggcagaccgtccccgaggtgccggacgggactgaccgtgaggatcacttgctttccggcgagcgggcctgcctgcagatcgtcgtaacgggcgacgatctcttcgacggtcagacgccggcgccgaaagagttctgcaggttgcttgtggcagttggccacgatctctccggtcgagcggagctcgtacacccacgccgtcccgaaggtaagaatcacgcggtcggcttcgcgcagggcgctggctcctgccctgcgggccagattcattttcgagagagccattttctgcgaaccgtccgaaaaagctccgtgaaaaccgtagtggaaccagagcccgttgcggcagccgagttcttcggggacgacctcttgcggcgcggcgtaggattcgagggttgcagcgagcgaaagggggttgaacaggatgccggagggattgctcgtgatccgaaaccgggctccggacagccggcccgagatgtgttcggcgaagcaggatcccaacgccagcagacggttttcatagccgatccggacggagagcggcgcgattcgtatttcagtgcggaatttcatgccgtaaagatagacggaaacggcgtaaaacggaaattcccgacagggagttttttcgagcggaaaacagaggagggggcgggaaacagaaaataaattttcgatcgctctcgcctttccctgtctttgacatagttttagatgggatgcgccgagagaaaactgcgaacaagttcccgttttctcccggctttcactatctttgtcatatgattcgcaaggcaaattgtaagatcaacatcgggctggacgtgctgtgccgtcgtgaggacgggtatcatgaattggcgaccgtaatgattcctgtgtatggactgtacgatgtcgtcgaagtggaacatgcagcgcaaacttccttccggtcgagcggccttacagtcgattgttcggatgccgataatctctgtatgaaggccgtacggctgatgcaggcatgttacggtgcgggcgatgtttcggttgcgctcgacaagcggatacctttcggtgccgggctggggggcggatcgtccgacgcgaccgccgtaatcttggcgctcgatgaattattcaggttgaagcttccggagcgggagttgatcgactgtgccgcagcactgggaagcgatacggcctttttcgtgcgcaatacgccccaactttgtacgggacgcggcgaggtgatgactcccgtgaaactcgatctgcgggggctgtggatcgctgtggtaaagcctgattgcggtgtttccacgcgcgaggcttatgccgggattcggcctggcgttcctgccgtcccgcttgcggagcggatcgcccgacctgtgaccgaatggcagacattcctgaaaaacgatttcgaaccccatatttttgccgcccatccggagattgccgcagccaaagccgcgcttctggatgccggagccgtttatgccgccatgtcgggttccggatcggccgttttcgggcttttcgatgatgaagaaaaggcgcggagccgaagcctcacgccttttgtctttcccttacaataaataaaacgttgccgttccgctgccggtttattgacggttgcacgccttgacgggaatcttctcgatgcgtcgctggtgacggccgccttcgaaatcggtggcgaggaactcttcgacgaattccactgcctggtcgttggtgatgaaacgggcgggcagcacgatcacgttcgcgttgttgtgctggcggatcaggtgggcgatctgcttgtcccatacgagtcccgcacggatgccctggtgcttgttgagggtaatggccatgccttcgcccgaaccgcagagtccgatcccgcgctccagctccccgctttcgatggcattggccagcgggtgtgcgaaatcggggtaatcgacgctctcctcggattcggggccgaagtcgaggacatcccaacccttcgcagccagatagcctaccagaaattctttcatttcatagcccgcgtggtcgctggcgataccgattttcttttccataacgtatttgtttttagttgatacctcgtgtacggcaatatttctgccgcgatcgctgcccgtgttccgggcgttttctgaaaaaccgttcggacttgtgtgccattccgaatgattttctccatattttacaaagttacggaaaataattcgaaatcggctgtctttcgcagactttcgtatcgggataaaacggcgacggtaaagtacggccgacggactcctttttcgacggagcccgttcggtgcaaggcatgttgagagacctgtcgttactttttccgttcattcgggtgtttgcggcccgatatggtgcgaatgacgttgcaaatcgtttctacgatctgttcatcgccggagatcgaactgtcgagcatcatgtgatagtagtgacgttcgccccattcgcagccggtatagtgcaggcagtgttcccgccgctcctggtcgatacgtttgagcagactttgagtccggttgtcagccacgccgtattcggacgctatgcgtttccggcgggtcgcttcgtcggcgtagatgaaaagatgtaaacaggcggggcggtctttcagtacgaagttggcgagccgaccgacgataacgcacggttcttggcaggcgatgttgcgtatcacctggctctgtgcgcgaaatacggcggtctgtaccgggtcgtcgtacatcagtcgtccgctcacggtttgttcgctctcttgtacggtactttcgcctaatccgctttgctgcgcggtcagcgagatgagttctctgtcgtagaatttcacgcccagccgttgcgccaaccgttctccgatgcgatgtcctccgctgccgtattcacgcgaaatagtgatgacgaacggcaaagatttacgggccgacaggccgggacggtcgtcatcggagttcaggcccgttctgcggttctgcggattgaacgacgaggcgtgacggcgtccgaaggcgtagtagtagcctgacgacagcagacacggtacgatcatgcagaggaacatggcgtcataacccagttgcttcaccagtatgcctgccaggaagccgcccgacgcaataccgaagtcgaaagccacgaaaaacgtggagcttgccgccccgcgccgttcgggtgctacggcgtgcatcgccatcgtctgtaaggagggctggatggcgccgaaactgtaacccagcagaagagccgacaacaggtagcacggtacgttgtgcgcgaacaccagcagcagaataccgatcacgatggctgcattgccggtgtaaaccagcctcgcttcgccgtaccgatcgacggcacgccccagcagaatacgcgtggctacggtagccagtgcgatgaagataaagtagattccgcctccgggcaagcggcaggaggcggcgtaaatcgccacatatacctccactacgccatacgccatcatgaaaaagaactgcgtgacggcggcgggcagggacatcggctcgaacagctcccgaatgcgcagcggggcgtcggataccgcgtagttgcgggaccgaatccccatgcctgtcagcagggccgccaaagccgtcagcgcagcgatggcgaacaacggtcggaatccccaggcgttcattaccgccagccctaatgcaggagctacggcggtggatatggccatcgaaagtccgtacattcccaatccttcgcccatgcgtttgtgcgggatgatgtccgtcacccaagtggaagaggcattgctcgaagctgcatggaacacgccgtgcgccgtgcgcagtataacggccgtcgcgatgcctgccgatacgaaataacccatcgggatgagtgtcatgccgataagtcccagtaccaatatcgcgtatcgtccccgcgtgtcgatgagccatcccacgaacggtcgcgatacgatggaagcgatgctgaacagtgccgttgccagtccgatagttaccgcatcgccgcccaagtaggtgacgaagaaggggaaagtaggcagcagcgcatgaaaatttacgaaaataaagagattcaccaggcagattcttaagaaagaacctgtccacaatcgatcttgtgtcgttgttcctttcatatttttttcggttgagttatggcaaaaaaaaagtgtctgaacagataaatcgcaactggatttacgtgttcagacactactcgttgttctctttaacgtccgcaaagatacgaataagccgcgagcaaaagcaaatttttttgcattttgccgaagcgaagtatctaacgcgaagtcaaagatacgaaaaaactgaatgtaaaagcgaattttttgcaaatgaccggaacgaagcgtttaaggtccacccgaatatgaaaaaaacttgtcgggcggacgtgttttcgcaaaaaccgctaattttactgcgtgaaaactttgggagccatactcggaagcttctttctgggactgggtatcgtcggtgtcttcgtgccgttgctgccgacgacgcctttcctgcttctcgccgcagccctttacgttcgttcttcgccacgcctctatgcgtggcttctgaaccagaagcatctgggaccttatatccgtaactttcgtgaaaaccgagcaatacctttgcaggcgaagatcgtttccgtgtcgttgatttggctgacgatggggtattgcatctttcgggtcgtcgatgcatggtggtgggcgcagctcgggctgtttctgctcgcagtcggaaccagttggcacatcctttcgttcgctacgttgaggaagaaggagtagtcttccacgttttgcgttgcgtgtcgagtacgacgatgctgacggccgcaacgaccagtcccacgcccagggcgcttgtccagccgaaccgctctccgaagaccgttgcaccgatggctactgccgtcagaggttccagtgccccgaaaatcgacgtgagcgtcggcccgatgaatttgatcgccctgaccagcgtgatgttggagatcgccgtggccgggagcgccagtccgagaatggcgagcctctcttttccgtcggtcacgagccggacaccgcccgtgaacatacctccgcagagaaacagcagagctccgaaggccatgacgtaaaaggtcagggtggtcgattcgacctgcgccgcgcggctcttgcgtacgccgatgatatagccggcataggcgaataccgaaacggcggcagcaatggtccccgccgtggtatctccgccccggctgccgattcctccggtagagaggagggcgacaccggccagcgaaacgccgatggccgctgccgttcgccacgagatacgttcgcggaaaaagagtgccatggccagggcgacggccagcgggtacatgaaatggatgatcgaagcgaccccgctcgagatattttgataggcgatcaccagactcaatgatgtcgcggcccgaaacaggctcaagaagaataccgtgcatagctcctgccgggagatgcggaaccggcagccgccggcgagtccgatgattcccaacgtcagggaagctactccccaacggtaggagagcacttcgaacgacgagaacccgtccgagagcaggagaatcgagaacaacggagctagtccgaaggtcgaggacgacaatgccgcatagatgatacccttgaaattcttcattttatgccagatatcgttctgcgacgctgatgaggaatcccagcagcagggcattgagcaggatgaccggagccgccttacggtctttgcccgtgaggatcagtacgaccggcagagccatcatgagagtcacggccataccgtccgcccaccagggcaggtaaggcaggttgctgtaaaagacgatcggtccggcaaaaaaatattggaggaaggccgacaggcaggagcggaacgagagtttttgggcgatcatcgggatgatgtccagagcgcctgccacggcacccgtcataagagccagcgtgaagtgatccatggactatttcgatgcgcgtttgcggtctgtttcgttcagcaggatcttgcgcaggcgcatggcgtgcggagtgacttccacgtattcgtcctccttgatgtattcgagggcctcttcgagcgagaataccttgggcggggcgatcgaggttttttcgtccgatcccgaagcgcgcatgttcgtgagctgcttggccttggtgacgtttaccgtgatgtcgttctggcgggtgtgttcgccgatcacctggccttcgtacacctgttccatcggagagatgaagaagcgtccgcggtcctgcagtttgtcgatcgagtaggcgtaggccgtacccgtttcgcccgagatgatcgagccgttgacccgcatttcgatttcgcccgtccaaggttcgaatcctttcaggcgatgtgtcatgatcgcttcgccggccgttgccgtgagcatattggatctcagaccgatgataccgcgcgagggaatcgtaaattcgagccgcgtacggtcgccgttggtttccatgttggtcagggtccccttgcgtttggtggccagttcgatcactgtccccgagtactcctggggacaatcgacggtcatctcttcgatcggttcgcacttcttgccgtcgatctccttgacgatgaccttgggctgtcctacctggagttcgtaaccttcgcgacgcatggtttcgatcagcaccgagaggtgcagcacgccccgtccgaatacgatgaaactgtcggcgttggctcccggttcgacgcgcagggcgaggtttttctccagctcgcggtcgaggcgctccttgatatggcgggaggtgacgtatttgccgtccttgccgaagaacggcgagttgttgatcgtgaagagcatcgacatcgtaggttcgtcgatggcgatcgggggcagcggttccggattttcgtagtcgcagatcgtatcgccgatttcgaatccgtcgatgccgatcagggcgcagatttcaccgcagggcactgcatcgacctttttcttgcccaaaccttcgaaaaccatcaactccttgatacggctcttttgcatcgtcactccgtcgcgtttggccagggtgacgttctgtccggtcttcagctctccgcgcgtcactttacccacggcgatacggccgatgtaggaggagtattcgagcgaggtgataagcatttggggcgtgccctctacgacggcgggttccggaatttcgtcgaggatggtgtccagcagcggagagatcgagtccgtcggctgattccagacgtgggacatccaaccctgtttggccgagccgtagatggttttgtagtcaagctgctcctccgttgctccgagcgaaaacatcaggtcgaaaacctgttcgttgaccacttcgggacggcagttgggcttatcgaccttattgattaccacgatgggtttcttgccgagcgagagggctttctggaggacgaaacgggtctggggcatcgttccttcgaaagcatcgacgagcagcagtacgccgtcgcacatgttgagcacacgctccacctcgccgccgaagtcggcgtggcccggggtgtctataatgttgattttacagtctttgtagatgacggatacattcttcgagaggatcgtgatgccgcgttcgcgttccagatcgttgttgtcgaggatgagttctccggaatttttggcattgtcgcgcagcacgtggctctgcatgatcatcttatcgaccagtgtggttttgccgtgatcgacgtgggcgataatggctatattgcgaagtttttgcataaagggaattttaggttacaaaggtaatgaaaatgagaacagagtgtgatggccgtgttcgttttttatagaattcctctcgattttctgcaaaaggagtggatgtatcggggtgtcatgctgcggattatgtctcccggtcgcttctgtttgcaggggcgggcatatcgattccatcctgtttcgatgcgggaggcgtggcaggtctgtttcgtacgttcgttccggaactcgaaatgcggtttcccgcctttcggtccgagcgacagccggtcgggagcgtgtcagacacagcgaacccgaacgcatctgcgttcgggttcgctgtgtctgacgttgcgatttatttatacacgacttccgccgcttcgggcttttcgaaagcttgcaaaagctggtcctgtccttcactcatataaatggttttgagcgattccatcgggttgcagaaaaagccccgaagttccggattgttacttacgtctatcgtttcgaactggttctcataacatctgagaagatacagggcgggaagattcgacaaatccaaactttggagatcgttgttttgacattcgacccaggttaattctagactgtttagcatcaagtccgtcaattcgttgttgttgcagtaaaattctttcaatttggaaagattgcttgcatccagattttgtaatttattatccggtacgcgtaaatattcgattttcttgttgttcgtcaaatccaattcttgcagttggttctcgtcacaataaagtactgttagttttgggcatgcacttacgtcgagggtggtgagattattgctttggcatttcaaaaggtccaagtccggacactgtaaattcatatgagagatgttgttcccactgaaattgagcattacaagttttgtacaattactaagatcgagcgcagaaaggctgttgccttctaaggaaagatgttgcaattccggacaatcgagatagagttcagacatttgacttaaatttgccattaggacttccagcttatggttgttgctgcaatcgagaatggatactttatcgaaagcaacgtatccgtctcctccgattctcaaatctttcaattccggattcgcagataagtcccatctctcaatttcaagagaacaggcataacaatgcagttgcaagagattcttgttttgcgacacgtaaatttttcagatgagtattgattgaacaatcgagcgtatcgagcagtttgttgttgcttacatcgagtttggtcaggtcgtttcccgacagattcaggtagcgaaggttcgtgcaggcttctatgccggtcgcatcgcacatataggccccttctcctgcatttatatttccggggcagtcgattcgtaccactaacgatgcttcgtagcgggagagttctccgttgcggtcgaaatcgaaatacttgagtaggtaagtgcggagaaattcgtcggggatcgttacggcttcgcgcccttccgggctgtcgggggtaagcgatccatcctgcggaacgggatcgtcttttgaacaggcagacatcaggcctgtaaatgcgagcaataacagagctaatcttttcatggttttgggtgtaatttaagaaagtttgacataaacgacgtcggttattgctcatatatatatatccaaatatttacgaaataaaatgacggtttggatataatttttttgcatccttatcgtttctcgataaattatcgctccgtatacctcctcatgacttcctttttcgtatcgttcattcgtcgaaataaacggatttatcggattgttttgtcaatgtgttggtcgataaaagggtaaatatgattatcgcccgatacagttttgtggaggtcggtcctttattttgtcgggtaaagtaatccagccgtcgataggtttacccgggttcttttccgatagcggtcttgcccccctcttccggctggagccggtttgtcaaagtcgggattaaatgccatttcaaacaaaaaagcgccccgaataaatctcggggcgcttttttgatgccggtcctgatgggcagggattcgggtttactttgtgttttttacacgtcgggtgagcgacgcggcgtaggcgtcccaatcctcgatctcgcgccgtgctacgcccgattcgatggctgcacgcgccacggccgtggcgacgaccgcgagcagacgcgggtcgctcggtttcggaatcaggtattcgcgtccgaacgagagcgacttcagaccgtatgttttcaggacctcctgcggaaccggttccttggccaggcgtgccagtgcgtgggtgacggccagcttcatttcgtcattgatcgtactggcatatacatcgagcgcaccccggaaaaggtacgggaaagcgagcacgttgtttacctgattgggatagtccgaacggcccgttgcgaagatgatgtccggacgggatgccatcgcctcttcgtaggtgatctccggcgtggggttggccaaggccagcaccagcggatcgtgggccatcgtgcggaccatttcgggcgtcaggatacccggagctgaaacgccgaggaagacgtcggcaccttggagggcgtcggccagcgtatcgacgtcttcccggtccgtagcgagttgttccttgacaggattcaggtcttcgcggcgggtcgaaaccacgcctttgctgtcgcagagaacgagattttcgcaattcaggccgagcttcaggaaaaggcgggcgatagaaaccgccgcagcgcctgcgccgttgatgaccacacgggcgtcggcgatggacttgcccgcgatttcgaggccgttcagcagggccgcacccgagatgatggccgtgccgtgctggtcgtcgtgcatgacgggaatgtcgagctcttcacgaagccgggcttcgatttcgaaacattcgggagccttgatgtcctcgaggttgatgccgccgaaggtcggagcgatggccttgacggtttccacgaaacggtccgtgtcggtcgcatccacttcgatatcgaaggcatcgatgtctgcgaataccttgaaaagcatgcttttaccctccatgaccggcttgccggccaaagccccgatgttgcccagtcccaagactgccgtgccgttggtgatgacggcgaccagattgcctttgcccgtatatttataggcgtcgagcggatttttcacgatttcgaggcacggctccgccacgccgggcgagtaggccagcgaaaagtcgtgctgcgaagcgaggggtttggtgggtactaccgctattttgccggattgcccttctgcatggtaacgaagggcttcttctctcatatttttattttgcattgtgttttatgggtttgatgaacttatttttttcgcaaggatcgcgcccgagccggtattccggtgagaaaaaccggaaaagatccgccggggtcagagcctgtttactgcgatcggttttttgtcgatgtaattgggatagaggaacagcggcattccgagtgccatacctgcatgtacctttccctgtatgccgatggatttcaaaaatttgcattttttgtcctgtgccagtgccgaaaggacgaagcccgtgtagatctggctgacgccgaggctttcggccatcagcgaaccgttctggtaggcaaggttggcatctgcggctccgaaacggtttgcgtatggagtgtgaatgagaatcagggttttggcttcgcgcaggatgaggtcgttgcctttgccgtattcggcgatcagacgccggaatcccggcaggtaggcatatagctccggacgcaggcgtttgagcaacggcttgacgaacgggttttccaatttgcgggcgattcccgcgaaagtatccagcgtgaagcggatgatcttgtccagaattgcgggatcggtgatgacggtgaagctcacttcctggcggttgctggccgtcggtgcccggtgggcggcttcgaggattcggtcgatcgcctcctgcgggacgggacggtcggagagcgcccggttcgaacggcgtgccttgcagaggagcaacacctgttcgggcgagggcagcccgttgcggtcgatcggatgaattttatcgggagggaatgagctgtggcggaccgagccggtcgggcaaacggccgcgcaatgtccgcagacgatgcaggagtcgatattgcgcagaccgatcgggtcgccgggtttggcctgcgtcatgatccaggcagggcaaaccttgacgcattttccgcatcggatgcagctggcggtgtcgatattgatttgtacgttcatctattttgtctgcgtattgtgtgtttgttaggttacttatttgtatattttatccattcgaacatatttttatccccggccagttttctattgatgtaataagtatctcctccacatccgttcaaaataatttggtccggagtatgtgacatataagaccaatatatgcccccgttcgggtcgaaataacaggttcctggcttgaatccatccaagttaatttcaagtgctcccaatacttcattttggttgttcggagaaaaataaaccgtccgttctttcgtatttggattcttcatcaaacggatattctgatagaataaagtaccttcgttcacattctcaattctcgcagcacgcaaataatacatgccgttttcaatattatatacgaacatattcctcggggtgttcactgctgcatcgatgtcatttgttgttttatcaactttaacccaagcacccaatcgccactctgttaatctgtcggcaagtgcatttgaatcattggctgctgtcatgtcgtagggttcgcacatttcgatagtttcagctttgaccattttctgtccattgactattatttcgttggaagaaatgtgcttcattgcaaagtcttcgggaatagattgtctgatgattgtatctttactgaaaagcgtgcaatcttctgtaatgctatctactttaagcatcaccaaaacggcatcatccgactgcttttcaaaatacatcataatcttatcggtcagcaacaactctgccttgtcgctaacccaaacaccagtttggtgttcgatcacatcgttattgctttcacaagcacacgtacatatcgctattatcagtgtgcaaaagcatattactaaatttctcatcttcactcgttgtttatgacctcatttaacatattcgattatagtgtctttggcgtcagaacagggactgttcgccatggtccgtccgggagaatccgagatgtgcataggccatttcggtcgcttcccggccgcgtggcgttcgtttgaggaacccttctttgatcaggaacggttcgtaaacctcttcgatagtcccggcatcttcgctgactgccgtagcgatggtgttcagtccgacggggccgccgccgaatttttcaataatcgtcgagagtattttgttatccatctggtcgagtccccgggagtcgatattcagggctgtcagggcgaaccgcgtgatgtcgaggtcgatatgaccttcgcctttgaccatggcgaagtcacgcacacggcgcagcagggcattggcgatgcgcggcgttccgcgtgaacggagggctatttccaacgccgcatcgctgtcgatcgaaacgtcgagaatgcgggccgagcggtttacgatacctttcagaaccgaagaatcgtagtattccaagtggcattggatgccgaaccgggcccgcagcggcgatgtcagcaggccgctgcgcgtcgtcgcgccgatcaaagtaaagggagccagttcgatctgtatcgaacgtgcggaaggacccttgtccagtacgatgtcgatcttgtagtcttccatcgcggagtaaaggtactcctcgacgagaggacttaaacggtgtatttcgtcgatgaaaagtacgtcgccggggttgaggttggtcagaagtcccgccaggtcgcccggtttgtcgagcaccggcccggatgtgactttcaattgtgcatgcatttcattggcgatgatgttcgccaacgtggttttacccagtcccggaggaccgtgcagcagcacgtggtcgagcgaatcgcctcgcatcagagccgcctggatgaaaatccggaggttatccacgatcttctcctgcccggcgaagttgtccagttcgcgggggcggatctgattttcgaactccaggtcgctttcgatgttccggatgtttttttcggtgctcatagtccattctgtttcgggcaaagataatgcagcgggtggaatttgttccccattaccgctgctatagtgaaaggtgtataggcaatcgtgcgggcttgcacgcaaagattgccgaaccgcctcctatcctctgcaaagatacgaataagccgcgtgcaaaagcaaatttatttgcgttttgccgaggcgaagtatctaagaagaagtcaaagatacgaaaaggcggacgtaattatgaatgtttgctttcaaaaatttccgggagcgtcctgtcttctgcaaagatgatgcgaggagaggacagggccgaatttgtttgagttcctttttcccctccctgcggagccatggtacgtaaaagtacgttgttttcgctgcgagcgtcgtttggacaaccgtatcctgttctttttaaggatggatcaattccgataattgcaagggtgtgtcgagcagatagaattaccggtcgtgggccgataatgcttttctaataatataggtgggaacgattttagatgaattagattattatataaccgtaatttatcattatatttgtccaaaattattatattagtatgtcgtaatgggggtatgcaataaaaaaggcgccttgaagaaggcgccttggaagtgatcccgacgggattcgaacccatatcgtaagaaccggaatcttaaattctatccattgaactacgggaccggtggcacaaaggtataaaaaaaattgaattatgcgacaaaaaatggataattggcaaagaatcgacagcgttattcgctgggcgaatatgactatcaactactttgcactctatattggattgccgcggggtgaaaacctctatcagataaaaaagggaaataatggtatttcccggaacctggccgacaagatcgtgaccaaattcccggaaatcagtctggcatggctgctcaccggagaaggtcaaatgtttgccgacgaaaaattatgcggagtgcaaataccgttctatcaggcggatgttgaatcttatattacgcgcattgatgaattgacttcggatcgggaaatggtgattccgcaattgacgggatgcgatttggctatgttgtataacggaaaggctatggggtattccattccgtccgggtcgatcgtgttcctgaaaaaaatgacgcccgatgagattattcccggactcgaatacgtgattgtctgtcaaaaaatcataactttgcggatagttcgcacttcggagcgggattccgagtggcggctggttgctgcagaccgggaaaatttcgacgatatattcgtcaaggcttccgatatcgagcaggtatatcaggtcgtgggcaagttggaaattaaaatctaaaatcgaattatgttttcaggaatcgtagagagaacggtgacgctcgccgacatccgtatcgaacagcagaataagacctttactttccgcgcggatttctgtggggaactcaagatcgaccagagtatcgcccacaacggcgtatgtttgactgtcgtggatattgcggaagatacctattccgtgacggcgatgaaggagacgctgttgcgcagcaacctcggacagttgcaggtcggcgatatcgtcaacgtggagcgttcgatgcggcccgatgcgctgctcgacggtcatatcgttcagggacatgtcgatcagacggccgtttgtacggctgtcgatgatgccgaaggcagttggtattttacgttcaaatacgaacctacgggagataactgcacggtggagaaagggtcgattacggtcaacggtgtcagcctgacggtctgcaattcgcaggaggggcagttccaggtggcgatcattccctacacctatgaacacaccaacttcaaccggatcaaacctggtacgttggtcaatctggagttcgacattgtcggcaagtacattgcccggctcatgaaaaattacctgaaatgatgcctatcaaaaccaaggagttcgcttctctgctggtggcggcggtggctgcgatcgtcgtcgcggcggccatgtggctgctcgaagcggtgtggtggcagaccctctgcgtggcttgcgccgtgtttgtcggtatgacgttactgacgttgtttattattcgcaagtacgtggcttataagctgaagccgatctactcgatcgtactttcgcgcaacgtgcatacgcaggagattttggatgagctcaaggacaagcatgtcgaaaacatttccgaggagctgaccgcctgggcggataccaacgacaaggagatcgcgcgactcaaggaaacggagtcgttccgcaagcagtatctgggtaatgtggcccacgagttgaaaaccccgattttcaatattcaggggtatatttcgacattgctcgacggcggtctggaggacgacctgatcaaccgtaaatacctcgaacgggccgagaagagtatcgatcgtttgatcgacatcgtcaatgatctggataccatttccaaacttgagagcaatatgacgcgtttgaaaatggagtctttcgatatcgccgccatgacgcgcgagattgccgagcaggccgaaatcgaagctgacaagaaggggatcaagattcaggtgaggggggccgacagcctgccttcgcctttctgggtctgtgccgacaagcatttcgtcggacaggtgttggtcaatttgattatcaactcgatccgttacggcaaggagggcggtctgacacgcatcaagttccgcgatatgttggacaagatcctcgtcgaagtcgaggacaacggcgtcggtatcgccaaggaggacgtgccccgtattttcgagcggttttaccgtacggacaaggggcgttcgcgcgagcagggcggtacggggctcgggctggcgatcgtcaaacatattatcgaagcccacggcgagcgaattaacgttcgcagcgagttgggagtgggaacgaccttctcgtttacgctcaaaaaggctcaaacgggatattcccactaattttgcataacgtatgacccttccaataaccgttgtctgggatttcaatcccgtctttttttcgatcggatcgttcgatatccgttattacggtctgatgtgggtgctggcgattctcggcggcatgctctttttcgatcaagtctgcaaacgcgaaggactgccccagaaggtttcggagtcgattttcgtctatggcacgctggccacgatcctcggggcccgtctgggacactgttttttttatgaaccgggatattttcttgcccatccctgggccatcattacgaagttccgtgagggtggcatggccagccacggcgctgccgtcggcctgctgatcggtctttggcttttttcgcgcaagaataaacttccttatatctggtcgctcgatcggattatgctaccggtcgctatcggcggcgccatcgtccgtctgggtaatctgttcaattcggagatcgtgggggcggtgaccgatgtttcctgggggttcaagttcgttcggctttatccgaatgttcccatcgactccatccccgtgcaacacccgacccagctttacgaagcgttatgctacctggtgattttcggaatcctttgctggctctattacggacgtgacctgggccggcgtcgtccgggcgtgatgttcggcgtggggctgatcgggattttcctgactcgtttttttatcgagttcatcaagttggatcaggaggctttcgagcagggtatgctgttgaatatgggacagttgttgagtattccgttcattctggtggggatttatatgatttaccggggcatgcaccgctctccggtagatcccgatacggtgcgggtggttcgacagcagactgtccggcagcagggcggcagttccaagccacgtaaacatcgtcgtatgaaatgatgcaggacgaggtaaataagattgttttcaatgcgctggccgacggacgggaaatttggtttccgggagtcggctcgctcgttcccgaatttcggagtgcctggcgtgcatcggctcggcagttggaacgtccttcccggcgcattgcctttctcctctccgagcagcggggcgtttccgtgatagacctgattgctcgggcgggggcttgcgatgttgctgcggccgaagatatctattcccggtggctcgacaaagcccgggtggaggacggaatctccattccgggagtcggggagctcaatcaccgctactttcggctcgattcgcagctcgatgccgttctcaatcctctcggacacgatccgctgccgctgaaacgccgatattcccggctacccctttatctggggatcgccttgttttgtacggcggctgtcggttacggaatctggcagtacggagagtggatgcggctgccgttcgtgggcgattctgaaaagcaggaggtccttcccgttgccgaggtcgtttcatccgtcccggcaagaaccgggagcggaactcccgaagccaccggaggtgatgccgaatccggtgcgatagactccgagccggttgctgagagccgtcccgtcgaaacgtcgcaggatgatgaggcggctggcgtcgaaaccctttccgagggcgcgacgggtgcgggccgcgccgatcttgacgccgactacgaagcgccggttcccgaggtcgccaggatgattcccggcagaacgtatgtggtttggggcgtttacagcaccgaggagaatgcccggcgagccgtcgccgaagcccgggcccgcctgtcggacacaaacttccggatttactttttcgggaagaagtggatggtttccgttttcgaaagcgattctgctgcggagtgccgtgactttatgagaaatgcgggggccggtctgaaggaagtgtggccctatacgaaaaaacgatgacttttgcactgatcctgcggcgtgcgatcgactggttttatcggcgccctttttcttgtgtgatatccgaaacggttttccgttacggggcctgcggtgcgatcacgctgtccgtggatgcggtcagctatgccctgatctatcattttctggttgcaggccgttatttcgacctgggattcgtggttatgtcgccgcatatcgcctctttggtactggtttttcccattacgttcttcaccggcttctggctgaaccgctatgtcgcgttccgcacgctgcctgttgcggcgggcaaacagttggggcgctatctattgacagtcgtaggatctattttgctcaattacgcctgtatgaaatttttggtcgaggtgtgcggtctgtggccgactccttccaagtgtatcacatcgctcgccgtagctctttacagctacctggcggcccgttattatacgttcaagggaatttcttcggtaaaatagaagggatctgtactcgatttataggccttgctcttcgacatttggctcggagttgtcgttgctcgcagttttcgggtgtttgcagtccggatttttccggaaatacttttgtgctgttcgtgaatcaggtgtgagcataattcggtgcagatggcatggattggggatgattacgaagtaaacaggcgaagcgggtttgaaaacccgcttcgcctgtttcggttcctacccttattgcagagttcgaggatacggcgggtcacgtcgcccgtgatgttgcccgcttcgcccagccgggagccgcgctcgttgaagcgacggacgatctcgtcgatcgtatcttgcccgatctgcaattcgtgcaggcgagtagccagtcccagcgagcggaagaactcttcggtggcgcggatcgtccggtcgatgcgctcgtcctccgagccttcacggataccgaacacccgctcgccgtattgcaggatttttcccttcttctgttctcgcattacgctcatcagggccgggagtacgaccacgagggtctgtccgtgcgtaacgccgtgcagggccgtcagttcgtgtccgatcatgtgggtcgcccagtcctgcggcacgcccatggcgatgaagccgttcagtcccatcgtcgcgcagagcatgaagttggccatctggtcgtaatcgtgctgattcgctcggattttgggggcgatttcgatcagcgtttgcagaataccttccgcccagcggtccatcagcggcgaaacgcccgtgacggtcaggtattgctccatgacgtgtacgaaagtgtctgcgataccgcaggctacctggaacggcggcagcgagaaggtggcttcgggatcgaggatcgagaattgcgggaacgagtggtggaacgcgaacttctcctgcgtggcgaggttggagatcaccgccccggcgttcatttcggagccggtggccggcagggtcatcacgtcgccgaacggaacgacttcgccgattttgtcttcatcgagcaccagctcccaggcatcgccgtcgtagggaatgcccgcagcgatgagcttggtaccgtcgagtaccgagccgccgcccaccgagagcagaaaatcgaccttttcggctttgccctgggcaatggctttgcgcagggtttcgattttgggattaggctcgatgccccagaactctacgaagtcgcggcctttgagcgctgcgaccacctggtcgtacacgccgtttttcttgacggagccgccgccgaaagtaaccatgatcttcttgtcggccggaatctctttcgccagcttggcgatggagcctttgccgaagatcaacttgaccggattttggaaagtgaagttgttcatacgtttctcgtttattctgtttgttttcccgacgaattgccgcaaggttcttttcgtcgggttgaaagcattgtttcaagcttcatattttatgccgcattttcgcgctaccgtttgtacccggactctttcagcttttgcagttcgtacatgcggtcgcggaatttggcagcggccagaaagtccaacgacttggccgcacgctccatctcttcccgggcccgggcgatctgtgtgtcgatgctctcggtcgagtaggccgacgtaacgtctgcggccagcgtctgccggttgtcgggcagagggtagagaattccatccgtgacgggtgtctgaaccgtatttgccagcagggtgctctgtcccgagccgcttttctgcgcctgtcgggggagcatttcgtgctccatgttgtagcgcatctgtttttcgcggcggcggttgctttgttcgatggcatagcgcattgagtcggtgcagtggtcggcatagaggatgacgttgccgttcgaatgccgcgccgcacggcccgcgatctgggtgatcgaacgcacgttgcgcaggaatccctccttgtcggcatcgaggatcgccacgagggccacttccggcaggtcgagtccttcgcgcagcagattgacgccgatcagcacgtcgaacatgccggcccgcaggtcttcgaggatctgcacccgttccagcgtgtcgatgtccgaatggatgtagcggttgcggacccccactcggtcgaaatatttggagagctcctcggccatgcgtttggtgatggtcgtgacgagtatcttgtcgtcgttgcgcacccgcttgtcgatctcctccagcaggtcatcgatctggttgtccgtgatccgcacttcgagtggaggatcaaccagtcctgtcggccggatcaactgttcgacgatcactccttcgctcttcatcagttcgtagtcggccggtgtggcgctcacgtagatcgtggtgccgaccagttgttcgaactcctcgaagcggagcggccggttgtctttggctgcgggaagacggaacccgtactccacgaggttctccttgcgggcgcggtcgccgccgaacatggcgtgcacctgggggagcgtgacgtggctctcgtcgatcaccatcaggtaatcctgcggaaaatagtccagcaggcagaagggtcgcgtcccttctgcacgtccgtcgaaatagcgggagtagttctcgatgccgggacagtaacccaactccttgatcatctccaggtcgtactccacccgctgcttgatccgctgcgcttcggccggacgtcccgcttgctcgaagaaggcgatttgcttgcccaggtcgaggtagatctgctgcacggccgtgtgtatgcgctccttggtcgtgacaaacaggctcactgggtaaagggtgagtgcgtcgagcgtttggatccgctggccggttacggggtcgatgctctggatgctctcgacttcgttgtcgaaaaaggtgacgcggaaacactggttgccgaattcgccgaaagccgccatgatgtcgatcgtgtcgcccgtcacgcggaatgtcgcgggggtcagttcccgttcggtccgggtatagagcgcttcgaccagtttgtagaggaactgcttgtagttgaggatttcgccgacttcgatatgaatggccatcgagtggaaatcgctcggattgccgcagccgtacagacacgatacgctggaaacgacgatgacgtcccgccgccccgagagcagggtggcggtcgtactcaaacgcatcttttcgatttcgtcgttgatcgaaaggtccttttcgatataggtatccgtcgaaggtaggtaggcttcgggctgataatagtcgtagtaggaaacgaagtattcgaccgcattttccgggaaaaagttcttgaactccccgtagagctgtgccgcgagggtcttgttgtgactcaatacgagggtcggccggttgagctggctgatgacgttggccaccgtgaaagttttgcccgaaccggtcacgcccagcagcgtattgtgcttcgagccgtgccggatcgaggccaatagctgtgcgatcgcttcgggctgatcgcccgtcggggcatagtcggataccaatttgaagtccataaggcaaagataacgataattgaaaattaacgttcaaaaacagaatatattttgcctctgttttttcaggagtgtaatagaatatgttttatgtaaaacatgtatttttgtataaattcagttttgcgaacaatctttcctgcggcggaaaaaatatacgacatgaaaaaaataattattttgatcgtttgtgttttgtcggcttgttttgccgctgcacaagagcctgttccggtactcactttaggtacctttcatttcgattttcccaatctggatcaggtgcagtatgccgaaagcgagcaaatagatgtcctgaacccggtttaccagaatgagatcgaaacattggtcggtttgttggagaagtttgccccaacgattatcgttatcgaacggccggttaaaatgcagttcgagacggactctctgttccgtcgatatttggcggactgttatgatttgcagcgaggagaagacgagcagatcggattccggctggcaaaacggctggggatagaccggatttactgcgtagatgaatggggaaagcactatgacgaaatcgatgagttattacgcgatgaaaacagtaaggagtatatccgtttcgaaaccagtttttacgaccatccggattctattaaaaggtttgtgcccgaagctgttttcaaggagcagggaattattgccgaacttatcgagctgaacgacccggagcatattcggcgtagtctgggtaattacttgatcggtcatttcaaatatgaattcttctcgaacgattatatcggtgtagattttgaaacgggaaggtggtttaaccggaatttgcggatattccggaatattcaacggatcgaaacggggccgtccgacaggatcctcgttattttcggagcggggcatctgaatttactgaactatctattcgaatgttctcctgagtatcgcctcgaagaggcgaataagtacttgatgtaatccgtaataattgaattattcgtacctttgcaaagatgatcgaccgggaaacaatagataggatttacgccgctgcgaatatcgtggatattatcggcgaatacgtgacgctcaaacgaaagggtgtcaattatcaggcgtgttgtccgttccacaacgagaagaccccgtcgttcgtcgtatcgccttcgaagggggtttacaagtgtttcggctgcggcaagggcggcaatgccgtcactttcctgatggagcacgagaatatgacttatcccgaggcgttgaaagccgtggccaagcgttacggtatcgaagtgcgggagaaggagatgacgcccgaggaggtcgcccgcaacgacaaccgcgagagtatgttcgtcgtgaacagttgggcggcggagtatttttcgaattacctgctccatgaaaccgaagggatgagtgtcggcatgacctatttccggcagaagaggggattttccgatgcgacgatcaagaagttcgggctcggattctgtcccgccaggggcgaccgaatgagccgggcggctttggctgccggttataaggaggagtttctggtttcgaccggactttcgatcaagcgcgacgacggttcgctcttcgaccgtttccgggagcgggtgatgttccccgtgcataacatttccggccgcgtggtggctttcggaggtcgcacgctgcgtacagacaagtcggttgcgaagtaccaaaattcgcccgaaagcgagatttacagcaagaaacgcgagctgtacggcctgtttttcgccaagaaagcgatccagcagtatgatttcgcgatcatggtcgagggatataccgacgtgatttcgatgcaccaggcgggggtggagaatgtggtggcttcgtccggtacatcccttacgaccgaacagattcgcctgctcggacgttttaccaggaatatcacggtgatctacgacggtgattcggcgggtattcacgcttcgctgcggggaatcgacatgattctgcgcgaggggatgaatgtccgtgtggtgctgcttccgccggaagacgatcccgattcgttcgcccgaacccatacggctgcggaggtgcaggagtatatccgggccaacgaggaggatttcctgacgttcaaggccaagctactgttgaaggatgctgccggcgacccgatcaagaaggcggcgttgattaacgacatggtgcaatccattgtgcagattcccgacccgatccagcgctcggtctatatcaaggagtgcgcacggatcatggacatcgacgagaacctgctgattgccgaagtggggcgcaagcgtatggcttccacgggcgaccgcgaagccgaggagttcgtgcggcgtcagagcgcccgttttcgtgccgagcagactgcgcagcgccctgaaacggtttttgcgggacaggtgaccgggggcagcagtgccgaagcgctcgaacgggagctgacgcgttatctgctcaagtacggtcattgttcgttcgatttcaaggagggccggaatgtcgttcaatataatgtcgccgaggtaattttcggggagttggacgccgacggtttggagttccagaaccgggtcttcaatgagattctgcgggtttaccgcgaacagtggtgcgctttgggattgggggtcgaggtgccgatccaccactttatcaatcactccgatccggaggtgtgtaacgtgtcggtggatatccttacttcggaggatcattacgttccgagcgaattgtggcggcgcaaggaggtccatgtcgagagcgatgccgagatgctggctgtcggagtgccgaaggccgtgacgctctacaagtcgaaggtgatcgagcggatgtcgcgggagcttcgtgaaaaacttcaggacgagaatcttacggacgacgagatgcaggacattatgcagcggctgtcgaacctgaacaggggaaaggtttcgattgcccggaaattgcatcggttgattctgtaaaaagaggggtccgggcgtacacgtatcactatgcataccgtgtgcaaacagaaaataaacagaaagatgtgtaaaacatatcaaagatagtcaaaggcgagagcagtcatgcgcgtttgcacgcaaagattgccgagccgcatcctatcttctacaaagataaaagaattagttatctttcccggacaccctctgcggttgattaatcaaatatggtgccggatcgtcggttcccgaacagaggttccggcggaaaaacagagaaattggatatggccgattataagaatattaacatacggaacaaacgcgcgaccttcgattacgaaattatcgaggagtggatcgcgggcatcgtgcttgtgggtacggagatcaagtccgtacggctgggcaaggcgtcgatcacggacagctactgttatttcgacaagggcgaactctggattcggggcgtgaatatcgccgagtacggttgggggacctgcaacaatcatgttccccgccgcgaccgcaaactgctgctcaaccgcaaggagttgaacaagattcagcgggcattgcaggacaggggattgaccgtggtgggcttgcggctctttctcaacgagcgggggctggccaaggtcgtcgtaggtctggcccgggggcgcaaggcctacgataagcgcgagtacctcaaggagaacgacgccaagcgcgagatggacaaggcgatgaagaaatatcgggcgtaacctcggagagcatcccggggccgatcgtcctgccgctgcctgctgtcgggtggaatcggatcgtacggctattcgaaacgctttgcagggagcggtttccctgcggcggcttttcggatcggagaaacggttcgcatcccgaggggcggacttcggcgatcattccgcttcccgttcgcttcagggagggggcgacaatgtcggtgcgaaggtctgccggaggtgtttggattgaaaaacgaaagaaaaaagatatgtcacttattctatgtatcgaaaccggcacggacatctgttcggtcggtttggcccgggacggggagttgatctcgctccgggagagcgatcaggggcgcgaccacgcccgccaggtcggagttttcgtcgatgaattgctgtcgcagaccgggatcgctcccgaagagctggatgccgtcgctgtcggcaaggggcccggctcctatacggggctgcgtatcggcgtttcgttcgctaagggactgtgctacgggttgcggatcccgctggtggcgatcggttccctggatgccctgaccgaagttgcgaaagaggattacgaagcggggattctctcggtcgatcgctgggaggaggcgtgcctctgcccgatggtggacgcccgccgcatggaggtttatacccgggtattcgatgctgcgggaactcctctttcggacgtatccgccgaggtcgttacggcggagagtttcgcggcatggcgcggagacggacgtcctttcgtgattttcggaaacggtgcggccaaatgtgccggattgctgcccgatgcgacgctgatccaggtggcgccttctgcccgagggcttgcgcggctggcacaggaggcgctcgatgcgggccgcacggaggatatcgcgtacttcgagcctttctacctgaaggatttcgtcgtcacccggtcgaaaaagaagttattctgaattatagaagggaatgcgtacccggttgcgtagaataacgatcgggtcttatatttttatggcctatatcactctgctttggagcctgatcgttatattcgctctttgttattcggatctcgcgcaaggtgaggatctgctttcgggggcagactggtgttttggtttaatgcctgtcgttctctgggccgctattatcttcgcatttcttcgtattcgtacgttcacgttcgatgaggcgggttttaccgtatcttatccgttgctttttgtccgaaagcggatcgcggccgaagagatcggctgtatcgaggtttttgtaaaattctgtgggaaagggctttcgtttgcctatcgggtcatccatataaatttagccgggcaaaggccggaaaatattatgaattgagagaactcgactatctgcacttcggcgagatattgaaagtaaaaatactgaagatcgattacgcgaagtgtctgcggctgaaacgggagtatattcgggagaatagcccttcgatttttgatctgatattttggataggactgtttcttttcggagattaccttgtcggttggatgatctgtcagctttttacccgtcattatgaggagctgcctgcggttcctcttatttcttttgtatttgtgtgcgagtggctttatatcgaatttctgcttcggatgagaagagaaaaagagcggttgaagattcgatcgtgaatttttactcaataggccctgtaactcctcagctccttgttgaggagtttttctttacccccgaccagccggtcgagcagcgcatggaagcggggggaatggtcgtggtggacggtgtggcagagttcgtggaggatgacgaagtcgcgcagatgttcgggcagcgtcatcaggtacaggctcagcgacaggtcgttgcgcccgttgcaggagccccatttggagcgggtggcccggatcgttaccgaacggtattgcagaccggttcgcactgcgagttccgctacgcgggacggtagtacaaccatcgcttcgcgccgcaactgttcccgccggcggagttcttcttcgggcgaaagggtggggcgtggaggttgctgggcgagccgttcggctattcgatccctggctgtctgaatccattcgatgcggctttccagaaattccaaagcccgggcggtcgagacgccgtaagggtaggagagccggacggggccggaaggccttacgcagagtgagatccgccgtgcccggcggctttgcgagagggtcacctctccgactatcggatggacgatcgtcttttgcctgcgggcgggttttctggtcgcgggcttcgattttggattccgggttgccggatgatccggctcggagcggaacaggtcgaataagtcgcgcagcagggacatcgtgtcgagaggttggagggcaggattaaccgattcgctgacgtacgatttcgaacagcagtactgccgctgccgccgagacgttgagcgactcgatcttgccgatcatcgggatcgccagctgttcgtcgcagagcttcagcacctctttcgaaatgcccgtatcctcggcgcccataacgagtgccgtaggcttgcggaaatccgcgtcgtagagcagcttgcggcttttttccgtagcacctaccacctggtagccttctgcctggagcgctttgagcgtgttgcggatcgaaccgacgcggcagacgggaatggcggtcagtgcacccgccgacgaacgaatcgcctccgaattgacgggagcggcattcttcagcggtacgatcagtccgtgcgctccggcacattcggccgagcgggcgatggctccgaagttacgcacgtccgtcacgccgtcgaagaggacgatcagcggcgtctcgtcttcgggcacccgttccagaatgtcgttcagttcgacgtagccgatgggggagatctgggcgacgacgccttggtggttgccgcgcgtgaggcggttgagcttctcgacgggaacctcctgtgtgcggatgcgatgccgcaggcagaggtcgcgcagttcggtcatcaactgcccttcggcgcctttgcgaatgtagagtttttcgatctgtttgcccgcttcgatcgcttcgactacggggcggatgccgaatacaaggttttccgtcatggtattggttggttcgttagttgattttttttgtctttttgtcgtgcggcttttcggatcgggcccggaatcatgcttttcggtgttctttatccggacagtcgaatcggatgtcgccaaaagttttattctatttttcgaacgattctgcgggtgcgtgcggtgattcgccgggcctccttttcggaaagtttgccgttcattttccgggtgccggggatttcgcaggtccggactttcatccctcccgtacccaatatttcacggaccgaacggacggcaccccggctctgccgtgcgaggatgttgaaaggccagggcgtcgtacaggcagcgatgacgagtgcacgtttgcctttttgccggggctgcggaaggccgagagccgattcgcccatgaaaaccggaacgagccgctcgaagagcatcttcagccgcgctgacataccgccccagtaggtcggagtccccaccacgagcaggccggcctgccggatccgttcgccgacggcatgggccgcatcgcggggcagcggacaaacgttcgtcgcgcggcactgcatacaacccgtgcaggggcggaactccgtgcggtaaacatcgatccattcgatgtcggctccggcctgccgcaaggtgtcggcagcggtgcggagcgcctggacgacaactccctgcggatggggcgatccgttgaggataagtgctttcatggtgctgctggctttcttccggctccgatcgttactctccttcggtgatttccagttcgtacgacgccttctcccattcgtgcatctggtggtcgtattcggctttcaactcgttgtaagccttgtagtcggcttcgttgtattgggtcgcttcggcgaatttacggtcgtaatccgcgatcttcttctccagatcggccagcgatgcttcgatcgtttcgaccgccttgcggagcttgcgcaggagtttttcctgctctttcttctgttcgtaggtcagcttgcccgaagagctggctttcggcgccgcctctttcgcgggagcgtccttacgctccacctcctgcaaggattccagtttgcgtttttcgaggaagtagtagatgccgccgaggtattcgcgtacgccgccgttccggaattcgtaaaccttggaaaccatgccgtcgagaaactcgcggtcgtgggagacgacgatcaccgtaccgtcgtatttcatgatggcgttcttgagaatatctttcgaacgcatatccatgtggttggtcggctcgtcgaggatcagcaggttgtaaggctccagcatcagacgggccatcgccagtcgtgcgcgttcgccgccggagagtaccttgaccttcttgtcgatgtcctcgccccggaacaggaaggcgccgagaatgtcccgcagacgtgtgcgcacgtcgccgacggctacgcggtcgagcgtgtcgtaaaccgtgaaatcgccgttcatcaggtcttcctgattctgtgcgtaatagccgatgtttacgttggctcccacgcggatcgaaccttcggtgggcgtgagttgtcccacgatcatccgggccagcgtggtcttgccttctccgttgcggcctaccagggcgatcttgtcgccccgttcgatggtgaagttcgctccgctgaagacatgtttggagccgaacgacatcccggcctccttgatctctgcgacgatctgtcccgaacgcggggcgggcgggaacttgatgttgagcgtggcaagatcctcctcctcgacctcgatacgctccagacggtcgagttgcttgatgcgcgactgcacctggttcgatttggtcggcttgtagcggaatttctcgatgaactcctcggtcttttcgatcatccgctgctggttttcgtaagcggccatctgctgcgcccgccgttcggcacgcagcacgacgtatcgggagtaggggactttgtagtcgtaggctttgcccagcgagatctccaccgtacgggtggtcacgttatccagaaaggcgcggtcgtgcgagatgagcagcaccgcgccgttgtagtttttcaggtaatcctcgagccactggatcgactcgatgtccaggtggttggtcggctcgtccagcaggaaaatcgagggccggcgcagcagcagtttcgccagctcgatgcgcatgcgccagccgcccgaaaattcgctcgtggcacgctggaagtcgctacgcttgaatcccagaccgagcagcgtcttctcgatgtccgcttcgcgggtatcgccgcccaggatgtgataatggtcggtcgcttcgttcagccggtggagcagcgattcgtagtcggacgattcgtagtcggtgcgctcggcgatttcgcgggtgaggcgggcgatttcggcttcgagcttcagcacttcgtcgaaggctttggccgtctcttcgacgagtgtcgtagtgtccgctacgcgcatctgctgcgggaggtagccgatcgtgcattcgccgttgtaggagatcgaacccgaggtgggctgctgttcgcccacgatcagacgcagcagagtcgttttaccggcgccgttcttaccgaccaggccgatgcggtccttggggttgatgagcagggatatgttgtcgaaaagcgtccagccgccatagctgacggtgaggttgtctaaagagatcatggtttcgttttctgcgattttccgtgcgtgcggaacgcccggcttgccggaagtaggtgcttgggtgaaaggagtcggaggttagctctgcaacattctctcgatctccgcctgcgggtccggggcgccgaagacggcgctgccggcgaccagagcgtcggctccggcgtcgaagagcaggcgcgagttatgggcagagatgccgccatcgacttcgatcactgcggtagattccgtttcgtcgatcatggcacgcagttcccggattttctccagcgagtcgggcatgaaagactgtccgccgaaacccggctcgacgctcatgacgagcaccaggtcgatcaggggtacgatgtcgcgcagcacttcgaccgacgtggcgggcttgatcgaaacgcccgctttggcgccagcgcggtggatcaggtcgatgcaccctttgggattgagcgtggcttcgtagtggaaggtgacgattccggcgcctgcctcggcgaagcgggtgacgtatttttcgggttcgacgatcatcagatgtacgtccagcagtttggacgtggccttgcggatggctttcatcaccgggaatccgaacgagatattagggacgaatacgccgtccatgacgtcgatatgcacccattcggcggcgcttcggtcgatcatctgcgtatcgcgttccaggtggccgaaatcggccgacagcatcgagggggatatgattcgttgcatggttttagattcttaaaactgaataatagaaacaaagacaattttggagtagagtttacccaaaataccttgttatttttggcaaagatagtaaattcgaaatagaatgaggatgtcgggcaggggaatttatttgtagttgtttggcgttgtaatatttccggtctgtttatgctttgtattacggacagtcttgttgtaattattttagttgttatgctggttttacagggattctgttgaacaggaacgagaagagagaggcattgcctctctcttctcgttccgaaaaatacttttttctgttgcaatgcttgtcgccggttttaacgaaccgatatcggctcgacggtattctgaagacgatatatgtaatccggccattccgtctgtacgttggtacccgtgcggaaatatgcatttgttaaaggaatgttggtctgcatgttcgaaagcgacatcgaactggacataggaataggtgatgcaccttccttggagagcggcccaatcaatactctctctatttcgctatagttaccagaggcatcttcggccatcgagaggaatgtgccttgctggtcggccgggaagagaatcagtgtggacgtttcgtctttgagtgtcgcttccgtgctgacgtttgtcaaaatagctgataacatctcttcttcgggatatttggttttgtcggtgtagtcggccgacaaacctaggaaataccagtgggccgcgtcggagctatggctgatttcgatgtctatggctagcaggttcttgccggctaatgaacttaattcgggatcgagtagagccagttggtcgcagtcgtaataagcccgcatccaagctttggcccaagcggacgaaacggttgcttttggtgtcgttaatttctcgccgacaaagacttcacctgccagcgtgccatcgaagttcatacagacagcgaacgggatatattccgtttccggagagaggagtccggcagggctttccgggccgaaagacatggtgaccgcaccacgagcacagaatccgcgaacgatctctccgatcgtgtagccctgttcctcgtaagtcgtgaatatctgttgctgataagcgcgtacggtctcttcattcgatccgtattgtgcgtatttttcggcaggtaagagctcataccagtataatacgctcgggtcgctgggtgtgacggaaacttccgcgctacgggccgtcaatttagcgggatcgatgctgaattcaaaaactgtttcggaggggtcgccagccggaatagtctggaacgaagccgactcaacactggttgtacgaccggcttggtaaccgaataccacgacggaataagacgtgtttgggtccagtgcgtttattgtgcggatttgcgatcccgtgtaaatatcgtaaagtcctgtgttcatcagaattccgttcgcatcgatataggcgtcggcgagttcctctggagtcccttgtgatgaaacggctataaaccaagtgtagggatcctgattggtgggagtaatcgagattctggctgatgcataagagacgtcttcgtcgggaatcttgattgagaatgtatttagggataccggagtcttctggctttcgaatgtgtattgggagacttccgaaagcgggttaccctccttgtcgatcgcagcggccaacagatggtaggtcgtcgatccgaaaagactttggagcgtgttgttgaatggtcctgtgtgggtgatgtcggctacggcaccggctcggtcgaatccttcttcctgaatgccgtactcaatgtcgctttcgagcatatctttgaataaagcgtctttatttttatttgcgtctgtaaattccttgtcggtagcacgagtccaataccatgtttgtgtattgtctgatggtgtgatggaaatctcggctgcattcggactcaaggtttggacatcgaatgtgaaagtcatttcgacgggattggattgctctccttcggatggaggagttatgtccggctcattttccttgttgcaagcgcctgacaggattccgcacaagaatagcatgttgatataaagaagtctgtgctttatgttttttgatatatgtttcatggcttggtgtttttttgttggaaatattttcagccgtcattaaagaagacggctgaaaatatagattacttgtgtctgtttacaaagcagtgaagccgtccatcggaccgacatagtcagctattactttgattttgtgtccgagtggagctacgaagaagccttcgtagtggagcgtccatttttggcttccgctgtcataagacagattcaggtcgccttccatgagtacatacggaaatatgggatcgtccaaatcctgtccgagcgtggcgtatgagtagccgggaatgaactcgatctgtgtgggatcgaagcctgcggccgatgcatccggagcacgattaataaagaagaggcgcatgttggcttctccttcggtgtcgggttgaaggtcaatacgtccaatataggaacgctcgtaaccttccaaatctgacgtaagtccgtatgaaactacggctggagtatttgaataggtgtcttgccatacattatattgaggctcctcgggatcttcgcctcctccttgttcccctatagaaccttggaacgacccagtcagcgtgcttccgtaaacgacttgtgccgacgcgttttcctgatagataatatcgtatgaatcacgggcgtcgattgtgagcgtgtattcgttggtttccggactcacttcaacttttatcgagccggttttgtagccgatttccgacgggccgagtgtaccgttgatgtaaacgggagcgttggcgaaataggctttggccaacgatacggttcctgcttctccattttcgctgattgggtagttacccgttgcgagcgtttcggtttcggaatggaataccagcgagaactgtttcaggtcggggtgagcagaactgcgtagcggaagggcgattgtcttcttttcggcattccatttggcccctccggtttcgtcgaataccacattgttgagagaatagttctttaactccatctcgtgcgagagtatgccggagaatcgaccggtaaacttggtttcgcttttggataatgtgcctgtaatggtcagaattacagtgtttgccgtgcctcgttcaattttgaccaatgtccctgcaggaaggttgtcgtcaatgtcgctattcccttcgatgtctatcagataagaggaggatactgttttataaaggtcttctgcaagcaggcggctgccgtttctctaggcgccgttgttttcgataccttcaagtttgatttgggtctgataaacacttgtgttgtccgtttcgaacaggttaattagtagcatgccgttaggcagataaagtaattctcctgttgaaaaagtgatatcgatttgctccggtttcggttcgggatcttccgtccctgggtcttcgtctttgagcggggtaagttgtaatttgttggaaattgtcttgcccgtctggttcgcagctgcagcgataacggcatatgtaatctgcttgtcgacgggaactcggatcgaaagtttgttcttgtccgtgagtttaatgctcgttccggttgcgaaaatttcatcagcagtcgtggggagcgattcgttcgcgttcatgcagacgtaagcgcattgctcggcattttccacgttgatcgagaagttcagtgccccgatttcactttctaaagcagaaattgagatgctcggttcggggataaggtctgatgtttcgtcatcactacatgcagagagcatggctgtcaaagtcaatcctaccaggaaaaacttcatggaagcaaagttcatcatagagcatttttttggttaaagaataatttcagaataaatatatggataaaaaatgattttacaatgttgtttcgaaaataaattagattatattttttaggttctttgcctctattataaaatgtaaataaatttgcttttgcatttgacttattcttatctttgttaaagattggatgcggttcggcaatctttgtgtgcatgcccgtacgattgcttgcatcttttgttatttttgttgctgtcatgaataccggaatcgttgtcgttttattgtcgctcggcgtcgtttgcgccgtgctgggtttgcttttgctctccctgcgtcgggataacgcccgtttgtcggacgaacgggctgctgcggacgaagctcgccgcctggccgaggagtcgcgccgggtgtccgaagagaaatccgctgccgccgaaatcgaaatccgcaccctggtcgagcggagtacgctggcgcaggcccgtctggaggcggccgaacagcgaatggccgaggcacgtgccgaacgcgaaaagatggaggagactttccggacccaattcaagaacctcgccaatgacattctgggcgaacagtcgcgcactttcaaggagaccaaccgcgaagcgctcgacgtgttgttgaaacctttccgggataacatcgtggagttccgcgagcgggtcgagaagatctactcctccgagaacgaacagcggggggcgttgcgcaacgagcttgaacgcctgatggaactcaatcgccgcatcaccaccgaaacgaccaacctgaccaacgcgctcaagggcaattccaaagtgcagggcgactggggcgagatgatcctcgaaacgatcctcgacaattcgaacctgatccggggcgtacattacgatacgcagctcaatatcaaggacgaagcgggaaacaacctgcggcccgacgtggtgctttatctgcccgaaggcaaacggatcgtcatcgactcgaaggtgtcgctcacggcattcgtcggatacgtcggggccgaggacgaggcgacccggcgccagtatcttgcgtcgcacgtcgcgtcggtgcggcagcacgtcgtcgaactgggtcgcaaggagtaccagcgattgctcgattcgcccgatttcgtcattatgttcattcccaacgaaccggcgtttctggcggcgctgcaaaacgacagctccatctgggccgatgcctacgacaagaaagtcatcatctcttcgccgaccaatcttttcgctttactgaagttggtggacgatctttggaagcggaacgcacagaataagaatacggccgacatcgttacttacggtacgaaactctacgagcagttggtggctttcaccgcttcgctcgaaggggtgggacagtcgctcgacgccgcccgggacaagtacaacgatgcctacaagcggctttgcaccggtaacgacaacatcgtccgctgcggggagcggcttcgcaaactgggaattccgaccaagaaacaacagtctgcccggactttgcaggcggccgatttaccggacgaagagtagcttcggcaggggcgggattgccccggcacgacagcggtgcgtaaccggtgcgaggggtgcttgaaaaagccggatgtcgggaggaggagatgcgagtttcctcccgagatacgataaaaaaaatctaccgggatgctccgtcgccgatcacttatcgggcaggaaaattccggcagatttgtatttcaaattgtctaaagcagcttttggagcaatacttcgtccttatacccttcgggggtacggatccactcctttttaaccccgacccggcggaatccggctctttcgaagagagtcaggctggggacgttgtccgcgagtacgttgcaccacagttgccgcagccggagtaccgtgcgggcatactcttcgagcaaagccaatgcctctgccccgtatcctttcccgcgctgtgccggatcgtaaaccagaatgccgacgcctgcccgttcgtgctgcggctcgaaatcgaacaagtcgatggctccgatcgtttcccccgctgtgtcgtcgatcatcaaccgcagttgtccgcatcggtaaataccagcctgctgctcctggatgaattgttcgatcgaatagtgcgagaacggttcgatcgtaccgctgactgtccacaacgaaggatcgttttcccaccggcagagcagttcgaggtcctgaggttcgacggcccgcaggctgcaaatatggcctcggagcatcattagcaaagtccgagcacctgattgcgaatcaacatggcagcaccccaggcgctggccgtcttgcccattttcgacaagcggaatttggtgtccttataaaccagattgagcgagtatttgttggtcgccgacttgaggggcagcatcaggtagtcgcccgcttcggccagctcgccgcctacgatgaccgtttccggattgaaggtgttgatcaggaaggcgacggccttgcccgccttttctccgacctcctcgatcagttcgatcgagagattgtcgtcgtgcttggctgcgtcgatgatctcatcgacgtggatggcttcgtgcttgttgtatttttcgcgcaggatcgtattgacaccctggctgataagccgaccgaacttctgttcgatcgcgattcccgaaacttcggtttcgaggcaacctttcttgccgcaggagcagatgatttcgttgtcgaagaagggaatgtgcccgaactctccggcaaagccgctcttgccgtagtagagtttgccgttcatgacgataccgatggccaggccgcgtccgaggtggaggtagagtacgtccatctcgtctttggatttgctgttggtgtattcggcatagcatcgggcccgggagtcgttttcgagcagtacgcggatgccgatgcgttgttcgatcatatcgcgcagggactgttcgctcgaagtgaaatagcggtaactgcgtcccgtcgtgggattgacgcgtccgctgacgctgacacccactccgaggattttcgcgcgttccacaccgcacgtatcgatgaaatgtgcgatattcgagcagattttttcgaggcattgagggcgatcctgcagttcgaagtcggtcaagagttcctctttgacgatattgttgtgcaggtccgtgatgaggaacgacatgttgtcccggccgatattgacgcctgcgaaatagatggccgagctggccagtccgaagacgttgggacgtcgtccacccggagtttcgaccttgcccagatcggagacgatgttctcctgaacgagttcctgaacgagcttggtgatggtcggtacgctgatgtgcagctctttggtaagctccgagagcgtacactccccgttcaccgccatatgtgcgatgatatttcgcttgaagaggttgttcttgtgcgaaatacctttcagattgtcatcttcctgtcggctgaaaaattcggttaacgatgtcatagttattgatgtcgtttgatgtcttctgtaatttttgtgcaaatatagaaagaattcaatcgaatttggcgtatttgatcttgtgatatgaaaaaaaattataaacaaaatagaatcgattgcttgtcaatcgattctattttgttttcggaggcgggttacaacgtcgatttcgactctacgaccgcttcgggattcacttttttgataagaccctgcaggacattgccgggaccgagttccgtaaattcggtcacgccgtccgcaagcatgttcttgacgatgtaggtccagcgtaccggtgcggtgagctgtgcgatcaggttggccttgatcgtcgccggatcggtttggggtttggcatcgacgttctggtagatggggcagacaggagcctggaagggtgcttcgttgatcgctttttcgagttcgaccttggccggctccatcaggggcgagtggaatgcaccgcctacgggcagacgcagtgcgcgtttggcgcccgcttccttgagtttggcacaggcggcatcgaccgcttcgacgctgcccgagataaccagttggccggggcagttgtagttcgccgccacgaccacgccgtcgatcgaggcgcaggcttcctctactttggcgtcgtcgagtcccaggatcgccgccatcgtaccgggtacggcttcgcaggctttctgcatggccatcgcacgtttggaaacgagccgcagaccgtcttcgaacgaaagagcgccggccaccaccagggctgaaaattcgccgagcgagtgtccggctaccgcgtcgggcttcacgcccagcgccttggccatgatgaccgagtggaggaatacggccggctgggtgactttagtctgtttgagctcttcgtccgtaccggcgaacatgatgtcggtgatgcggaaaccgaggatttcgttggcctgctcgaagagagccttggcttcggggacattgtcgtagaggtctttgcccatgccgacggcttgagcgccctgacccggaaatacgtatgcgtgtttcatagtttctgtcaaaatattttttggttaccgggcaaagatagcaaatattttcttacatttgcactgcaacggttcacgaggggttacgccccgtcagattaaatgggaacgcagtgaaagtctgcgacagttcccgctgctgtgagtcctgcccgacgatccgaggtgatcggcccgcttgcgggcggtgtttcggatgcccgggtgtattgccgcgacactcttttgccactggtcctgcggggtcgggaaggcgttgcggcggggacgagtcagaagaccagcctttgcctgcccgatgaacggacagttcggatgatatgcgtctgcggagaacggagctttcggaaaagacctgcgaggcatcttttcggtggattgataacctgaagcgaggcggctctctgtttccctgatgaaatatttttcgaaaccgttgtacggcatacgccgaagtgcggagtttgtgcagaagaagagtgtcttgccgataaaggtttcagtcgcaataaagtagagattagtatggactgaaacaaagaggtcgatctgttgccgggtcgatctctttatttctggtgtcggacggaatgggctgcccggcttcttccctcgggcgcggaaaaacggctgtcgggtgtctgcgacggattctcccgatacaaaaaagcagcgctttatgcgctgcttttttcaattttcctgatcgcctatttctcttccacgatcttgaaggaatccttgtagagtccgcaaacggggcatacccagtcgtccgggatgtcttcgaatgccgtgccgggtgcgatgccgctttcgggatcgcccttggccggatcatatacgtagtcgcaggcggtgcagtggtatttgcgggggaatatgcggtcggccaccttgtcccagtcgatcagctcccagtacgatttgatgaaatccgcgcggcggttgcggtagtcgatatagtaggcgtgttcccatacgtcgatcgtcatgacgggcttgaggcctttggtcatggggttgccggcattggattccgagaagatctgcaatttgccgtccttgtcggctgcgagccacgtccagcccgagccgaaaagtccggtagcggctttggagaactcttccttgaaggcttcgaccgatccgaagtcgcgggcgatgcgatccgctagtttttggggcatcggcttctgatcgggggtcagcatcaggaagaagaacgtgtggttccaggcctgggccgcattgttgaagatcggaccgtcggctttcttaacgatttcctgcagggacatcgactcgtaaggcgtgccgggaatcaggcggttgagattgtccacgtaggtctggaggtgtttgccgtagtggtattcaaaagtttctttgctcattttcggagcgagcgcttccgtcgaatacggaagttcgggcattttgtgaaccataattctttctgttttaggttttgatattgttaaagattcggtttgaattgtcgtcggagccgccgccggggtgccgtgcagcaggatatatccgttgaggtaggcggcgaagagcgtccagagcaggtaaggtacgaagagccaggcggcagcgcggtccctgcggctcgcggcgaagatgtagagtcccacgaggatattcagcagtacgatgtcgatgaatccggccagcggattgcgcagcgtgaagaacaggatgctccacaggaagttggcgataagctgcaagacccacagccggatgattcctttgtgctgccgacgcacgatgagacgcccgagcgaaagtcccatgcagaggtacaggacgctccaggcgatcggaaatacgatattgggcggcgtgagtgtcggcttggtcagcgtcggataccattcggcgatggacgaagcctggaaaaaacttgccgagatacctactgcaaagcaggcgaggacgggaatgaggtaagccgctatttttttcatgcttggggtattgaagtttttctgattccgtgcaagaacagtgcaaattacgctgttttctttccaaatttaataaaaataatcggattcgaatccaattccggctccttgatcgacgtgtttttttccagggcggatgtcgttttcccggtattcgtcgtgaacgtatcgataaacggtttcggagatatccgctatgattcgggcatttgtttccgggttttccgccgaatctttgatgaagacggcgatggtatagcgggtgccgtccggcaggatgacgaatcccggatcgttggtcccggcgaagatgcctcgttcgtcgcggtcgctcgtgccggttttgtgtccgatgacggcgccggttcccgacagtggtttcggaagacggtcggcacctgttttacagtttatcaggttttgccggatcatttcccgcagtgtaggagtgagaatctgttctgttacgagcagctccagcagagcggccgcttcgagcggcgtactccagttttcgtagcacgtttgcggatcgtcgtgcatctgctgttccgttgctgcgattgcgaaattgcgcagtccgagcgaccggacgtagcggtctgtcgctgccggaccgcccgtgtgctcgaagaggatgtcgcaggcgttgttgtcgctcagctgcaggctgtactccaacagacggctgactgaaagcgagatttcgccttcgggaaattccttccgaaggggactgtacgtgtcggggacgagctcttcttccggaatgaatatttccgtgtcgggcgtcagtccgtttcggtccaggtaatctgcgacggcgagggcctggtggaatttgaatacgctcatcagggggtagcggtcgtcgttattgaccgttaccgtatcttgtgcgtcgaggatgaccgcaataccgatttcggcttttttatcctttatcacctttttcagccgatacgacaggtcgtcgccctgcgctgctgcggcaagcggaaagaacgaaatccagagaatcgagatcagtgtgcgcatatacttattaggtgagattgaccggaaacaaaaatagtgtaaatttcgattccttccggggtggatttcatgatttttgtatctctttcgattattaggttatgccggcgggcgattcggggtatcgtgtcgatgccgtaaatcgtccgattcgcctcgaatcagtccgcctcggtcgattctttacggccggaagatcgaaacgccgctaaaattattagctttgcggacggttgattttgtgaattatgagaaagaacttactggcagcaatcgttttgctggtattgtacattccttctgtttgggccgcagcggggtatcctgtgcggggcagggttatcgaccgtctttcccgggaaccggtcgcctatgcagccgttacgatcaccggccagcccggtaagggcgccatgaccgattcgctcgggcgattcgagatcctgcaggtgaagcccggcatttacagcttgacggcgtcgttcatcggttaccgaacggtcgtgacccccgaataccaggtgtcggcccggacgcctttcatcgaaatcgagatggaggaggagccggagcatctgaatgaagtcgtcgttcgtccctcgcctttccgccgtacgatcgagagcccggtcagtatgcaggtgatcgggatgcgggagatcgagaagagtcccggctccaatcgcgacgtgtcgcgtatcgtacgttcctatccgggcgtgtcgttttcgcccatcggttatcgcaacgacctgatcgtgcggggcggcggaccgtccgaaaaccgcttcttcatggacgggatcgaaattcccaatatcaaccatttcgccacgcagggtgccacgggcggtcccgtaagcatcgtgaattccgatctggtgcgcgagatcaatttctatacgggttcgtttcccgccgaccgtgccggggcgctcagttcggtgctggatttccggctgcgggacggcgatctcgaacggcagaccttcaaggcgacgctcggtgcctccgaagtgtcgctcagcggcagcggacacgtgggtaaaaagacgacttacctcttttccgtgcggcaatcctacctccagttcctcttcaaattgctggggcttccttttctgcccaattacatcgacgggcaactgaaggtcaagacccgtttttcggagcgggacgagctgactttcctcggactggtgggcatcgacaacatgaagctcaatctcgacgagaagggcgaggagaacgaatatctgctcagttacctgcctcgtatccaacaggaaacctttactgtgggtgccgtgtaccgccattacgccggacggcacgtgcagtcggtggcgttgagtcataactacctgaataaccgcaataccaaataccgcaacaacgacgaatcgactccggataatctgaccctgcgtttgcggggcgtggagcagaagacgaccctgcggttcgaaaatcgctcctacctgggccggtggacgctgcgcgaaggagccgaactgaactattctacctatcataacaagactttgcagcggacttatcagcaggaagccgagctgctggactatcgcacttatttgggaattgtcggctggggctttttcgtgggggccgactatgcctccgcagacaagcggctgacggtttcgatgggggtgcgggccgacggatgcgactattcggcggaaatggagcgtttctggaagcagctttcgccccgtgtgtcggcttcttatgccttgagcgacagttggtcggtgagcggaagcgcagggcttttctaccagttgccgccctatacggcgctcggttataaagacaatacgggcgagctggtcaatcggggtctggagtatatgcgggtcctgcaaagcgccgtcggcgtcaactggcgtctgcgtgaccggttggtggtttcgctcgaaggtttctacaaatattatacgaatatcccgctttcggtggcggacgacgtgccgctgacctgcaaaggcaacgactacggtacctcgggcgacgaattgctcgtttcttcggcccagggacgcgcctacggtctggagctgatggtgcgttggcagcttcccgatcgtttcaatctggtcggtgcactgaccgttttcagcagcgaataccgcagtcggcacgatgcgaaatatattccttctgcctgggacaatcgtttcgtggcgaatatcagcggtacgtacgatttctcgcgtgggtggagcgtcggggcgaagctgagcgctatcggcggaacgccttatacgccgtacgacgtcgagaaatcgtcgctcgtcgaggcgtggaacgcttcgggacgtccttattacgactattcgaaatacaataccggacgtttggatgccttcgcccagttggacgtgcgcgtcgataaggtgttttatttccgtaaatgcatgctgggtatctatgtcgatttgcagaacgtgaccttcagcaagctccgtcagcccgacgtgctgatgagtaccggcgtgatcgagaatccttcggctccgccttcggagcagcgttataagatgaagtatatccgccaggcgagcggtacgctggtgccgacgctgggcgtcacggtcgaattttaatcgtacagccatgaaaaacaacctgctcagcgacaagctcgcctacaacggggatacgaaaacacggactcatctgcatctgtgcagctatactgtggatcgggtcgaagaggctgcgggagatgatttcggggagatgaagtcccgctttcagcccgatggcatcacttggctgcagattcacggactggaagatacggatgccgtgcagacggtttgtacgcatttcgggatcgattttctggtcatgcaggacattctcaataccgaccatgccagcaaggtcgaggagcacgatcagtacaatgtgattattgccaagcagattatgggtggcgaagcgatgcaggtcagtctggtgcagggcgctgatttcgtgctgacgtttcaggagcgggacaacgattttttcgacgatgtgatgcgtgccatccgtaacaatgtactgaaaatccgtacccgacagtcggactacctgttttcggtgttgctcaatggcttgataaccggttatatgtcggttgcagcggcgatcagcgacgggttggaggagctggaatctgcattgctggccgataccggagaccgggacatcggagtacagatgcaggagctccggcgggattacatgcagctcaagcggacggttctgccgctcaaggaacaatattcgcggctatttcgttccgattcgagtttgttgcaccgggtcaatcggcccttcttcaacgatgtgaacgatcacctgctcaacgtggcgcaaaatatcgacatctgccgtgaaaccctttcgtcgctgatggatttgtatatctcgaacaacgatttgcggatgaacgatattatgaaacggctgactgtcgtatcgaccatcttcattccgctgacttttctggtcggagtatgggggatgaatttccgtaacatgcccgaactggagtgggagcacggttatatcctggcctggggcgtgatgatcgtcatcggattcgtgacctatttgttcttccgcacgaaaaagtggcgttgaggtgcgcagtcggtgcttttttggcggacgatgcggggaaattccgggattttgattttctttgtaccaaaattccgggcggtacccgcgatttagccgacataaatccttgtgccgactgcgcgaacattctattgaaaacctccgatgaaaaagattttctcattttccctgcttctcatccttggcctcgtggcttcccagattcttccggggatgctcggagagagctatcctgcatttcgggccggggcgacgacctttctttatgtctgtctgtcgttcatcatgatcaatgtcggccgggaattcgagatcgataaaaaacgttggcgctcctatgccgaggactatttcatcgctatggctacggcagccgtaccttggctgctcatcgctctgtactatgttttcgtgttgttgccgcccgagttttggggcaatggcgacgcctggaaagagaatctgttgttgagccgttttgccgctccgacttcggccggcatcctgttcacgatgctcgcggccctgcggctcaagcgaagctggatgtatcggaaaattcaggtgctggcgattttcgacgatctggataccatcctgctgatgatacctctgcaaatcctgatgatcggtctgcgctggcagcttttcgtcgtcgtggtgatcgtctttctgctgttgtggctggggtggaagaaactcagtacgtatgagttgaggcaggattggtgggcgattctgacctattcggtcgtggttttcggtgttacccaactggtttacctgctttccaaatattatttcggcgaggagggcagtattcatatcgaggtgctgcttcccgctttcgtattgggtatggtgatgaaaaccaggcatgtcgaatctcgcggggagcggatggccgcttccggcatttcgttcttgttcatgtttttggttggattgagcatgccgttgtttatcggtatgactgctgcgactggggaagctgcttcttccgtgaccggttcgcagcccatgatgtcgtggggcgtgatcgcattccatgtggtgatcgtctcgttgctgtccaacctgggcaaacttttcccgatgtttttttatcgtgatcggaagttgagcgaacgtctggccctttcgatcggtatgtttacccgcggcgaggtaggggcgggcgttatcttcattgcgctgggatatagcttgggcggtccggcactggttatttcggtgctgaccctcgtgctgaacttggtactcacggggatcttcgtcgtttgggttaaaaaactcgccttgcggacttacgctcccgaagagttcgatgccgtatcgacgatccgttgaaagacggatttcgccggaatccgtttctgatctttcactccggatataaaagattgcgggaaaaaaggttccctttccttgtgaatatcgaatgcagttgggggcgtgtgggctacgaggtttgattctgcttttgccgcagctgtccttctgaccttgtgcagcaacagtggagggccgctttcggagtggcgacaggctttttccctctccccttcttatcctgtgttgggaggaaagtcatcagtttatagcgttgcatgtattttctcttttaactccgcagcatttccgtttaccctccagcgttttttctctccttttataatagtataggtgtattgtcttctgaaccgatcgaaggtgtttctcgcgatcccgtattccttgcagattgccgcgatactttttccctgattcagcatttggacgatttcagctctgccggttagccgtgcggatccgatttgttttcctgtttcccgaaagatactgtatttttccatattttgtcgcgtcgcattttatgagtcgggcgactattgcggattctgtttcgcctgtaggtactctgtggtggtatcggccaagtggtttttattttcagtcttgtctgctttgaatctctgatgctccttttgaaacatctgataattgccatatttggtcattatctgttcgatggtctgcattggcattatgccttcgttattgtacgacaatacgatgtatctgaaccgggcgttccggatcaaatctttgaatgtatgctgtactttcgccttactgcaataattcgatttgttgtattctcttagctccgtttttcccttcggagtaaatgatttatagtcggcaatcgtgttcagcagatggtagtttgcgctgtattgtcgggagttgtacggtgggtcgaggtataaaatatcgccctcgatccgcttaatcagactattcgcatcttcattgtacacttcgtgttcgccgttgtttatttggtaatctgcgggagcgataacgagcgttttctgtgctgactgtttgagatgtttgaaaaatgctccgtatacggatgccgtattggcgcatttggctgcgttttcgagcagacagcacagccggaaatagtataaatcgtcggatatttctccggtttctgccaatgctcgatagtcgatctgatggcatctatttttgatcgttgtcatcggagaaatactgacggtcattaccccccccctcgacaatattgagagtatatgagaccattctctgtccctgacagcgagttcagtatttctatataatcggctttgttcgcaagttcgtagcagttgcctatatagttgcgattgaggacataactgtaatacttccaattattggctattactttgctaactcgtgttttgaaatgagccctacgatacacgtacctgcaaagagatcgcagaataccatatccgatggattatcgccgacgacctttttgatcgtattgtcgataaaatcccgcagcgaatatttcgatcctatgtaattcatcactcgtacatgatattattaaacttcagcatttcttcgtcgtctgtaaattctataatattccaaggataggaggtaacgtctattggattttgtgtcgaacgctctgaatgcgttgatgtttttttgaccgagttctgattccgggcatatcaggattggatgtattacgctcggtctgttgggaatatactactgttctattcagtctatatatcgggatatctgtctgggattagttacggccttcagttcgataggtacgatctattttgttttttcatctattttctgcgaaaacatcacatcgattcgctgcatgccgatgccgcatgaaaccttgtttcctaactattctatgtttttgcaattgactttaagggcccggttcaagatcggatccctgccgatatgttgcgccaaatacatctgcaaatgtactttataggctttcctgttgcgtctcttgtagatcagtcggggcaagatgtcgaacgcggtctgtgtttcgtcggcatatacttcagtttgcaacatattttcgacttgtcttctgttttcatcggtgaaactgttcccgttgagggccttatggttattttttcgagcggattaaagaaaacaaccgctctgcctcatagggcataagcatggtatttccgcgattgcctttcagctttctgtatatcaaactgcacagcatttgataggggcctatataccttattatatcatccaaagcctcccattcggaagccccttttgcaaatacttcgtacggtttgctcaatacccggaatgtcagatttatccaaagtttctcgcgcaaatagtaaccgtcgggtttaaggaaagggtcactggcgatctgatatatgccgtaaaatttcccttcttttcctttcgatgtctgcacgtaaaatatcgcataatcgttcgcgcgtacccggctgaaatcggccatcattgcaaccagtgtatttcccgtttgagcaactgatatattggaatgtgctgatcggttgaaacctacggttttatttctggatctcgtgcctgcgaacatgtgctccagatgtactcggaaactctgctcggttgaataaaaagtagtcgcttttcaacgctctgtatttccagatgttttgtgcgcctaatttaccgcgattcccttcgatatttttaaccacgatgccctttaacttgactttcaggtgttgttttacggaatccattatcttgaaagccaaaggaatcacttcgcttttttcagaaatatccccaggtgactatcgcaaaataaccgttctttctcaagtatcggaagccgtggctattgcgttcgacaattttttttagaaagcatcgatgtccgaaatattggactggtccctgctgtcgtcggtgaattttacgatgtccagataaggcggatgagcgatcataaaatcgacctcctctcggtgcctttcgcccagctatgctgcgatcgcctcggaaaacggctgtcgatcggtgacatcgacactcttgattgcgtagttgatcgaagaccattcgctcataatgctattgacataatcgataatttttttgggggggcgaatccgatgtaatctttgcgcaggttttcatatgcgaacagggtagtcccgctgcctgcgaacaactccagcacggtatttccggcattcgtaagcgtttgagtagttggggaacgaaattgccgtgatagatattcttgtgcttgccttgcctctctctttcggggatcaaccacaggctgtccacatttagatcgatctgcttccagttatctttattgatctccataacctgtttgaatttatctttatacctcggctgaataagggactttgtaaaatttttttatcctacatagatcctttacggtgggatccaattacaaagatacacgaaacggtaagatatatcagctataaggggctgtttggacaataaaaaaggcggaaaacttaagttttccgcctttccgtaccccctcaggggctcgaaccctggaccccaacattaagagtgtcgtgctctaccaactgagctaaagaggcgtttgcaggtgcaaatgtaggatgttttttttatttctgcaagaaaaaaatattttttcttcgtaaaaaatgcagaggagggcttcgaaacggaattttgcttttttttatcttgtgtatatactaaataaaatattatttaagttatataggtgcatcgactggttaccgaattattatgtttcaagatttattatttcggtacatccgtccaggtgatggaaaaaacgccgcctgtgggctaaaaatcattttttttgggggggggattttttgtaggtacgaatatttgaattttaaatgtaagatattcaatatattgtgatttttgatttgcttttttattgaaaaaactgtcttaaaaagttgtttaagttagattaatttcctacctttgaaagaatttcggattaagaattcgattccgaatgaaggcgagaatattgattccgttcggtgcagttgctttatcgcaggaatacgctggggaacggacgggacaaaagaattgaattttgttggttatattgtgtattaggattattctacgatacttgcatggtggattttcgcttttttatgatgtttttaatacctaacttttaatttttattaacccgaaagggtgtccggatttcgatccggtagctctttcactaaactacttgttattttttttctatgaaaaagtatttttcttttgcgatggcgcttgtggcgatgctcgcaatggtgagtgcaagcagtggctgaagcgacgatggcgtggattacagcgtcaccatcgtagctaaaactacgctttccttatcgaaaaacgctggaacgggtcgtttggcgtatgaaattcaaggggccgataaatcgtctattgtcgaggcaacgacgaacgtggattggatcaagaatttcaactatgcggagccgggatacgtccagtttgattacactgcactcgacgagggtgtcgagtctcgttcggggcagatcaccctttcttatacgggggcagccgatgtagtcgttaccgtaaatcagggtggtaccatgacgttcgaacttacgatcgatccgaagtcgattacggcaaacggctgtgcaatgcagatcgttccttcgaacgagagcgagacctatctgtgcgcttttatgactaaagaatacgtcgattcgttcgagtccgacgaggctttcattcaggccgacttggaggcggtgaaagaacaggccgaaagtcgggggatgaagttgtctgaatggttgaacatcttactcatgaaaggttcgaagaccaataccgtggatgacttgtcgcttgccaatacggcatattatgggtatgtgtacggttgtacgtccgagggcgtgcctactacggaccttttcaaggcggagttcacgacccagaatgtcgagatgaccgaccttacgttcacggttacttccaagcaggtcaatgccgacccttatcccgacaacaatccttacaacgtagaggtaacgatcactccgagcaatccggatgcgaagtggatgttctcgacgatgaacagttatgtttacaaggttgacgagtggaccagcaaagagtatttgcaggagttgcagtccagtgcgcgtaagcagcgtccgactctttatcagggcgagcagaagttcatgttgaacacgtctttaaaaaaccgtgtatggggcggtaacgactactatttctggtgcttcggcatggatgacaactacaatatcaacagcgaaaatgccgaggaatatttcacggttacgaccggagagattcctgtaaccgataattgcacgttcacggtcgagaagttgaatgtgacagctcaggattgcgagatcaagattacgccctcgaatctggagacgaaatatttcatcggtatgtatcccggcggcagtgccgagaaatacggtaaaagcgtttgtgtcgagcgtctgctccagcgtctggatatgtatgattccggttcgggcctgggtgatggcacccctcccaactggcagaccaacgaatgggtgcagaaaggcgaaatgacgaccaagatgggggccgatcaggagtggcgtatcgagccggagagcacttacgaaatctttattttcggtttcgacaaatacggacatcgtactaccgatgtttcggtgaccgaattcacgactccggaatatgtcgctcctacagattttaagttggaattcgagttctcgaagatcgaaatgcgtagctttacttgtaccgttactccgtctcaggacgacgtttggtaccatgtaggtctgacttctgcaaacaacttcgatcagtataaggattggcgtcagttcatcgatgcagtgattcatgcagacggtggcggtacattggcacagtatgtcggtgaagaggttctgacatcttcgtgtacgccgggtaccgagtatgtggcttatggttttgcttatgcggatggccaggctcagtccgatttgagttctgcccgcgtagaatcgaaaccgttgccgcgtaatatgaaagcaactgtatctggaacatggcaggtttacaacggtgatgaacttgcagctcgttatcctgcagcttgggggaactatgctggtaatcagtatgtatgcgtttaccaagcggagccgactagtgaggaaactgctcatacgtgggtcttgatccatgcacctcgtggtggtacgctgcctctgccggatatgttgatcttcgattatttcgagaattatccgtttgtagccatctataaggatgctaagcacggtcgttgtactccgccgggagtaggtccttggggcttctactatgcaggtcaggatgcaaccggtgcttggggtgagttgatgtatgaagaaatcttgctgaacgatcctgaccaccagggtgatatcgatactgctccgaccgatggtttcgatgataagcgcggcgaggtatcggctgtatcgaccgtatcgaaggtggatctttctgctccgattcgtttcagccaggcttcgttcatgcagatcgagcgcgagcgtgcagaccatggcaagtcttcgatcctcaatgcagcttctaaaaaggaggtatcggataaattggattttgatgtaagagcacagctcaaggctgcttctgaaatcgttaaataatccgaaacaaaacggttattcgtcgaatttcgacgagtaacggaatcccggaggggaagagagcgatctcttcccctcttttttgtgtataaggatctttggaagagatagacttggggaaagtcccttgacattcgtttgtatgtcggggaaagtccggcggcatttgcgcctgttttacggggactgataatgtgattgtcttttgttttatgggattgattgggagcgaggtttctgttttgcagggaagatcgtcagtgccccccccctctctttggagtgttcgaatcgttttttataggaaggttgtcggtgctaagagtccgattattgataacggctgcttggggcaggaaatgacagagtcggattggtgtttgtccgggtatttcatccttgggcggagtgattggtgctggtgtccctattcttcggtatttttttcgtcgctcccgaacggaaagtaaaaagtaatgggcattgccgtctttctatagctatctatatagtggtaaatagaaaaaccggcctgcaaatatcggcggaatgctgagtagggttttgtattccgtataatggtgtcgaatcgggtgcgacagggtgggagtttcaaaaccagggcaaggacggttttcagagatattggaaggaacccttcgatagcggatgctccgtcacttgtcgcttgttacttctcctgtcatctgcatctattatctgttgcccgttacttgtgtccctgttatttaccttcgtcacctgctgactgtttcagctatccgtcgcttgccgttgctcgccatttgcccggttgtacgctgccggccttctgtcccctgactcatcgcccgattgcctgctaccagcttttcccggtcggttgttatctgtagttgccgctcgtcacgtgctaccaactcttcgtcgcttgctctctgctcccgtcgcttgttgttcgctgcctgtctttcgttactcgccatttgcgcctgtcactcgcttgccgttgcctgtcttttgacctgttgcctgctgtcagcactcgtcgtccgagggaggtttctgtcgtgcgtgttcgatcgtaaaacgaaacgatccgacaaaacttgtcggaagcgaggtgttttaagatgttcttggagtgtagtacgaatgaaaaaaggctgtctatatgtagcagacagccctttttatttttgagcggcgagcggattattgttcggccgacagccggagtttgtcgctgttccactctccgccggcatcggggtagagaaccgggcgctccttttcgaggcccttgaggtggagataaccttcgtagaggttgattccgttggcggaatcttcggcgagcgagaatgctacgacgcacggatgcagtttcgtggtgtggtagctctcctcgatacgggcgatataggccgcctgccatgcgggatcgttgctgggattccctcccttgcggcgggacataccgctgcggctggtgttgatcggagcctgttcgacgacatagaagccatatcggtcgcaaaggtcgtacagcgcaccggatacgccgcctgccggaagcagaatcaggttgtacccctgttccttccattcgagcagttggctcggcgatacggtcgtacccaggtcgggtacggccttgagtgctgccggatacccgttgatcgccaactgcccccgggtgttgccgacggtgcggaagccgaccttgagcgatacgtactccgtataacggccttcggtctgtgtcttgagccgcagggtgtaaagtatcgggttgcgggcgctccataccatcgtatcgggaatctgggcgaccagacgcagggtgtcttccctgcgcatgtcgagttcgatctcctggctgccgtatgtcacgacttcgtcctgcggcgtcagcagttcgtagtggattttcgctttcttgggattcagcgcgtcggttttcaccacgatgccgacctcgccgttgaagacgctgccgtttcggtacgttttggtgaacaggtcgcggatgcggatggtcggctgggaaaatacgtagcaactgcctaacgccggttcggagggatgcgtccaactctcgagtacggcgcttgctggattggacagcaccttgatcgtcagattattgaccccttcccggatctgtttggtgaagttgtaatccgccggattgctcccgttctggcaataccccgcgaccttcccgttcaggcgaatttcgtaggccgacgaagcccactccacatgcaggagcacctggcggtttacccaggcgaaaggcaccgtgaatttcgtggaaaactccgtgccggcttcggtcgtcgtcttttcccactctgccagcggggtgaagtatttggaggcttcgcgcgatccggcggcggcttcttctgccgtcggatagacgacgaaggtggtgcgggaaagctccttgcctatctcgaccggctccggcgaagcgtaatcctgggcgcaggccatccatgcggaagagagaaggagcaaggtcaaaagactcttcataaggcgataaattttttatgcggctcgggcggatgcggacgagttggacccgccgtccgcctttcgctgtttagttaagtaataagatacgatcggcactctttgtctgcgaacccgtacgttcgctcccgctttgcgctgtgctctgcggcttggcgctctttgtacgcggggcgatacggattccgtcgccttttcgtatatttgtccctgtaaagttactaattttttccgaatatgactcccgactatccccggctcaattttcctgccgtcaaattgcggatttcgcagcgcggggagcagacgaccgtctgggacccgcttcggggaatctacctggtgctgactcccgaggagtgggtgcgccgtcatttgatcgggtttctgatttcccattgcggagcacagcccatgcggatcgttcaggagtatgccgtagcgatgaacggatctccgcagcgtgccgatgtggtggtcgtggacgatcgggcctgtccgctgatgctcgtcgagtgcaaggctgccgggatcggaatagaccgtcaggtgctggcgcaggccgttcggtacaattcggtgctgggggcccgttacgtggtcctgaccaacggcctggtgcactattgttacgagtatgccgaggggcgatatacccgtatggaccgttttccccgcttgtaagtcataggctttatgcgggcctgatgcgcatggatttttcccgatacttttgcattcggatatattttggttaatttaatcaaaatatttgggggggggatttttatattagttttgtaccgaaaagagtaaaagcccccccccacaataatttattgtaaaaatatcggaatcttctgcatatagtaaaagacattatttcgtatcttggatattatttcgtaacgattggaaatcaactcttttacatcacttcaaattcatttgctatgaaaaaaattattctttcgtgcgctgccgctctgctggcgataggaagcgcccatgcaactcccaaatttttgagtttgaacaacaaacacggcaaaacaactatcaaaattgaaatccctgcatccgaccgtgatgaaaccaacggactttcaatcgaagatgtggtgctttataacagtggtaaaaccttccaggcaaagagtgtcgatgcaatttggggcgataattccaccgttattttgcagttcgagaaacttaccgctttcgaggattgcacactctctttttctctcaacggtgagccggtcagtctggatattcagagctgcctggccgatcgcaaataagattcgcccctcatagtcggggttggtggcaagcgtgcctgcgctctgggaatgcagagtttatatttgggggtcatgtctttccgatgtacccttggccaacgatcgcggcatcgagcttatttgcggtctgtgccgcttctgtaatgccgacacgcccttcctctccaaagaggggaagggcgtgtcggcttccaatagctccccgaaaacatataatcgcgttttgttatttgttgccgggcggtcgaatgtccgttcggaacggtgcgatttctcctgaagatatcgacttcggaggcgattctccgttatagattctggtaatgagcttcgatgtatcgttggaacgcctcccggtaattttcgccgatcggaacgtattcgctgtcacttatgaaaacccgacctttcacgtagctcctgatacgttgcaggttgacgatgtaggaacggtggacccgcatgaacatttccgacggcagggccgcttccatgttcttgagccggaaaagagtcgtgatggtcgatcggtcgtccagatggagccgtacgtattcgccttcgctttccagataaacgatgtcgctgatgcgtaccagtgtcgttttgtagtcggctttgatcgagatgtactcccggtcgcgtggagtggcttccggggcaggagcgtttccttgtgtcttccgataggccagcagttcgtacagcgactgcgccttggctgccgagcggctgaaatcagcgaagctgaacggtttgagcaggtagtcgatcgcatcgagtttgaatccctcgacggcgtattccgaataagccgtcgtgaagataatcatcgggcggctgacgagcgaacgtacgaactccacaccgctcaggtcgggcatgttgatatccacgaaaatcaggtcgatcggattcccggctagatattgctgggcttcgatggcgttggtgaatgctttttcgagcttcagaaaattgattttggcgatataaccctgtaattgccgcagtgccagcggctcatcatctatggcgatacatttcagcatggcatgatggggattatgagtttgacggtatagacggccggatcggaatcgtcgatcgagagcgtatagttgtcctggtaaatcaatgccagccgttttttgacattttcgagtccgatacccgtagtacccggccgggatttttcgtgacggctgttgctgatgacggccgtcaccgcgtcgtcccggtagccgattcggatatggatgaacgaggcgtggttataacttactccgtgcttgaacgcgttttcgacgaatacgatcagcagcaggggcgggatggccactttgttcgggatcgtggccggataatccaagcatatatcgatgctgctgtcgtaacggatgcgcatcaactcgatgtagttctcgatgaattggatgtcctttttgagcgatatggtttcgctgcccgattcgtagagaacgtaccgcatcatcttggacagttcgatgacggcgcttttcgcgtattcggtatctatgtcgatcagggcgtggatattgttgagcgtattcatgaagaaatgggggttgatctggtatcgcagataatccatttccgcttgcaggttctgacgtttgagctcctccatttgctgttcgtcgcgcagggagcgatacagcagtttgatacccatgttcaggcccgtcatgaagaatcccagcaggatgttccaatagatcgccagatcggtgaatgacgctttgccgttcaggatgtagggttcggtgtcgtatggagcgtatttttcatagatggcgaccagcgagaaaacggccgtaatggtcagcagattgacgaccagataccatacataacgatgttttcgcagtaacagtctgggagcgatcaggctgttgtggatgatgaagatcagcagataaggtgcgatttttagccaggcgatcagaatgttctccagactgacgtgtacctcttcgagcattttcgagttgaggaccggtactaggataatcaccatccataccatcaggtacaggaggttttctccgatcatttgtttgctgctgaatttcatattggcaaagatagcgataagccggaggcaaacgcaaatttatttgcattttgtcgaggcgaaatgttcggtgtcagagatagtgaaaggtgaggtcaatcgtgcaggcttgcacgcaaagattgccgaaccgcatcctatcttctacaaatacaaagatagtgaaagccgagaagaaaacgggaacttgttcatcgttttccgaggcgcatcctgttttctgcaaagatagtgaaaggtaaggacaatcgtacggactattgcgaagatttccgaggagccttcgaaacagcttgccgcctgaaaaggcggcaagctgtttcgaagggaaacttgtcggattgtcggcggaaaacccttcgatagcgatttttcgtgcgtcatcgaatcggcctatttctccagcagagccgtattgtataggtagcgcttgatgctgcgtttgggcgtcttttcaaattcggtgggatagaccgtgatgcttgcgacctgttcgtaggatgccaacagtttgttgagttccttgaggttgttttccatgattcggggcagttcctctttatcgatcccttcgagctccgcctgttcgaagtcgggaacgaccaatgccgtcaaacgactgttgtgctccagaaccagcgattcctggaccatatacatgttgttgagtttgtcttcgatctcttcggggtaaatgttctgtccgcttcccgtgagtatcatggttttcgagcggccgcggatgtaaagcgtgccgtccggatccatcgtggcgatgtcgcccgtatggagccaccctttttcgtccaggaccttccgggtttcctcctcgttcttgtagtaacccatcatgacgtgctcgccgtgcaccaggatctcgcccgcgacgtgttcgggatcgggcgagtcgatcttcacctggataaattccgagaggaaacgcccgcaggaaccggccttgaattcgttgtcgggagtgaagctgatgagcggagcgcattcggtcatgccgtatccaatcgtgatcgggaatttgatactcatcagaaatgcttcggtttccatattcatcggtgcaccgcccacgatgaagatgttcacctctccgccgaacgattccatcatcttcttgcggattaccgagcgcagggcggtattcagcagcggaatcttcatagcgatactcatcggccccttttcgagcagcggcagtacctgtttgcgatagactttctcgagaatcaggggtacgcagcaaatgatcgtggggcgcacgacctgcatggcttcgatcaggatcttcggagtgggaattttgcccagcagggtgatgtggcctccgacggccagcggcgcgagaaagtcgaatgcacagccgtaggcgtgtgccagaggcaggaacgagagcgtgcgtccgccgcgctggaaatagttcgtgccggtttgggtgtttatggctcctcgggcgaagagcacgttgcccgtcaggttattgaccgagagcatgacgcctttcgaatatccggtcgttcccgaggtgtagttgagcaggatcatccggtcgttgggaatcttgtgaaagcggatatgctccggtccgaaccctttcggataggctttgcggaagtgattttcgcggttcttctggaaatccgtcagtttcttcggatcccggcgctcgtagatcgcgttcaggtccgtgagcgagaagacggcttcgactttccggatctggtcggcttcgatcgcgtcccagaacgtgtcgcccaggaaaagcagtcggctttccgaatggttgatgatgtggatcacgtcgttggcatggaaatcctgcagaatgggcacgatgaccgcgccgtaagtgatcgtggcgatgtaggtgatgcaccagcggggattgttgcggccgatcagcgcaattcggtcgccctgccggatgcccgcctcgtcgaagagcagatgcagcttggcgatctcggcgcccatttccaggtaggtgaagttctcctgcttgaaatagtcggtcaatgccggcagtgcatagttctcccggaagctggtttcgtaaatattaatcaggttttcgcgtaacatagaattttcggtatcaagtagtggataattcaatttttagggcgaaacgcctgtcccggggggactggtgtccggccggattcgggttattcttcttaacctcttccggcaaagataatatatgccgggaacaaagcaaatttcgtgtgtttcgctttttgacagttcgtacaaatcggtattcgttgcgagcaaatatatgaaaatctatccaatcggtaaaatacccgttttttgtcggaagaattcggggatgccttcgtttttattttacaaggccgtttcagccggtttcgacagatcggatcgcagcggaaacagacacaaatagatcgaaatcggacaatacaagcgtgttgaataatggcgatttccggctcgctatttaccgtggattgaaagtccgatctgaaacgggcggatgaagcgatccgaatgaccgttggggcaggagatggagcagtcggatttttttgtgcctattcggatatggttccggtttcggaccttattcgataaaaaacgattcgccaaacaagcgaatcgtttttaccgtgctatttgtctgcttttcgatggggcttccagatgtatattttggattccgtgccgtttttcagccgaacgatatttttgcggtgggtgtagagcagcagaacggccgtgacgaacgagaagacgatgaaaggcaccgattggttcactttgggcgaagcgatcgtgaagaccggaaagcagcagccggccacgatcgaggcgagtgaaacgtagtgcgtcatcatcaggatcacgacccatacggcgaagcagagcagtactaccggcggataaatacccgtaatcgcccctaccagggtcgccacgcccttgccgccccggaatcccgcgaaaatggggaagatgtgtccgagcacggcggcgaatacggcgatgatcttgatatttatcagccacatatcgttgatgtaggcgtcgtatttgaggatctcggtcaatgtgaccgcgacgaatcccttgaggaaatccagcagaaagaccggcagggctgctcggcgtcccagtacccgcagcatgttggtcgtaccggcgtttttgctgccgtgttcccggatgtcgatgccgtaatattttttgcctatccatacggcgctggggatcgagccgagcaggtaggcgatgattatcatcgtgataatgcaatagtaagtcagtatcatgccctttatttgtcaggattgtatatgcaaatataaacgaaaaaaatttaaatactgcggcttttggggaaaatagtccgaagcgaacgggaaatccgggagtttttcgtatatttgcaaaattaaatcaattattaaccgctctaaaatagttaattttatgatcaatacgaaagctttattggagccgatggggtcttgggcctggtggcgttcctggattcagttgtttgtcggttgtgcgatcatgggatccggtttcgttttttttatcaatccttacaatttcgttccgggcggagtctatggcgccggcatcgtattgcataatattttcccgtcgatccaggtcggtactttcggctatatgttcgacgtgccgctgatgattaccgccgtattggttttcggcggacagttcggcgcccggacggtggtggctgcgctgttcacgcccggttttatgaatatcctgacgcggttggtctattccgatgcggcatttacggccgacggtatcaatctcgatccggcgctattgctgggcggttcgctcaacttgtcgaacgatctgttgctgacctgtatcatcggtgcggtcgttatcggcgtggggcagggtatggtcgtgcggacacaggctaccacgggcggtacggacattatcgccatgttgcttcagaagtatgcgggcatcaagttttccacgggtatcttcctggcggattgcgtggtgatcctttctggcttggtggtgatcggtttcggtcttggtacgggcgatagttcgggttcgggctgggtgctgacactctattcgctcattacgatcttcatctgttcgcgggtcgtagcccgggtgatcgacggtgcgtcgtacgacaagttgctgttcatcatcagcgatgaaaacgaaaaactccggacattcattctggaggatctggaacgcagcgctacttttatcaaggcacggggtatgtactccgaggaggaaaaggatatgattttcctggtggtcgatcgcaaggaggtgcatgcggtacagcgtaaggtacaggagatcgacccgaaagcattcttcgtggttacggatgcctacgatacctacggagagggcttcaagcctttcccggaagcgggtgcgattcaggcacagtaattttcagaaataccggggaaacgggaaccgcgatcgtcgattcccgtttttcggtcctaattttaccgggcgagtccggttttgcaactatgaataacgagaagataaatactttgcgtccgctgcagggtgcgggccgtaaactttttgtcgaaacatacggctgtcagatgaacgtcggcgatacggaaatcgtcgttgcgatcatgcagcaggagggctatgtctataccgacaagatcgaggaggcggatgtcgttctgatcaatacctgttcgatccgagataatgccgaacagcgcatttggggacgtttgcgggagatggctcatctgcgccgccgccggccgggactgctcgtcggtattatcggttgtatggccgaacgtttgcgggaacggctgctcgaaggggagaaccccgtggatatcgtcgccggtccggatgcgtaccgcgacctgccccgcctggtgcgcgaagcgggcgaaggcggccggggcgtcaatgtcctgctttcccgcgaggaaacctacgccgaaatcgctcccgtgcggctcgatcgcaacggcgtgagcagttatatcgccatcatgcgcgggtgcaacaactattgttcgtactgcgtggtgccttatacgcggggcgtggagcgcagccgcgatccgcagactattctgagcgaagccctctgcctgttcgagaacggttaccgggaggtgacgctgttgggacagaacgtcaattcgtatcgttatggagcggtcgattttccggagctgatgcgccttgtgtccgaaatttcgccgctgttgcgcgttcggttcgcaacgtcgcatcccaaggacatgagcgaccgtctgctcgaagtgatggcgtcgaaacccaacatctgccgctgcatccacctgcctgcccagtcgggatcgtcgcggatgctcgagaagatgaaccgcaaatatacgcgcgaatggtacctcgaccgcatcgccgctatccgccgctatatgcccgattgcgcgattacgaccgacctgatcgccggattctgcagcgaaacggacgaggatcatcggcagacgctttcgctgatgcgggaggtggggtatgaattcgcctatatgttcaagtattccgagcggcccgatacgttcgctcaacgtcacatgcccgacgatgtgccggattcggtcaagacggcccgtttgaacgaaatcatcgccttgcagaatacgctttcggccgaaagcaacgcccgcgatgtcggcaaagagttcgaaattctggtggaaggtacttccaagcgcagcgaccggcagcttttcggacgtacgtcgcagaataaggtggtggtcttcgatcgcggcgagtgccggatcggggattacgtgcgggtgcgggtgaccgcctcctcgtcggcgacgttgcagggagagttggtcgaaagaacccgcccgtttgaagtgtaataattggaaaagaaagaaaacgcatagtatgagatttgacgaactcgatctggaagacgaggtgctggacggcatcgacgccatgaattttcaggagatgactcctgtgcaggagcagaccattccgatcattctggacgggcgcgatattatcgcctgcgcccagaccggtacgggcaagacggctgcctatacgctgccgctgctgaaccggctgctgctcgaaggcaatgagaagaacgtcgtgaaatcggtcattatcgtacccacgcgcgagttggcacagcagatcgacatgcagttccagggcttttcctactatatgcccgtttctaccgccgtaatttacggcggcggcgacggccgcggctgggaccagcagaagcgcggcctgcaaatgggtgccgatgtggtgatcgccacgcccggacgcctgatttcgcacctgaccaacagccgggtggatctgtcgcatgtggactacctgattctggacgaggccgaccgtatgctcgatatgggtttttacgacgacattatgcagatcgtctcctatatgcccaaatcgcgacagacgctgatgttctccgcgacgctgccgcccaagatccggcagatggccaagcagattctgaacgatcccgccgaggtcaatatcgccatttcgaagcccaacgaggcgatcgaacagggtgcttatatttgttacgagggccaaaagctggggatcgtccgcgagatgttctcccggccttcggagtccaagactatcatcttctcctcgtcgaagctaaaagtcaaggagctggcccatacgctcaagcgaatgaagctcgacgtggctcccatgcattccgacttggatcaggagaagcgcgagcaggtgatgctcgattttaagaataataaagtgaggattctcgtagcgacggacatcgtcgcacgcggtatcgacatcgaggatatcggcatggtcatcaattatgacgtgccgcacgatcccgaagattatatccatcgcatcggccgcacggcgcgggccagcgctacggggcgggccgttacgttcgtgaacgaggaggagcagggtaaattccaccgtatcgaggagtttatcgagcgggagattccgaaattgtccttgccggaagccgtaggtgcaggccctgaatataaccccgccgctttttccggtcatggcggccgccggggacgcagtgggtcgggccgtggcggaaacggacgcagcgggggacgtggtcggagccgtggacgcgacggtgcgaagagtgccggtccggtacctgcagaaggtgtcgtcgcggctgcgaatgtggagtcccgccacggagaaggtcgtggcgagggtaatcgcggcagccgggaccgggggcgtcgtcgtaaccgaaatcgcaaccgtaatcgcaataaaggcggcgacgatacgccgcaggcatagtgccttttgaaattcgcagcgccggattgcggctcccgaaagtgcgggatcgcagtccggcattgtattttacggagccggccaagaccccgtaaaggtatgtccaatgtcccggaacgatgctggaataccgtccttgattgcctcttgcaaggaaaccgatccgcttgtgcggaccggcctgtcgatgttgtcgccgggagcaaggtgtcggctggcatttttcgaagtatcgttgtcgaggggagaaagcctgcggagccggaaagagtggcggaggcggaggcgtcatcgatcccatcgtatgaggcttttcgcgtcgggccgttcgtgccggacgggccttgttttgcggggcgttcggacagggtgaagaggacgtattgcgtaaaatcccggatgaatacatattcatccgggattttgtagcgatcttaacgaaatggaggaacctcctttcggtgcgtctgctgcgaatcactttttgttgcggggatcccacgtcgggtgtgccgggtcctccgctttcagggcttcctcatagtcgatacccaatgccttcgccacgcctttgccgtattcgggatcggcgtaggagcagttgcgcacgtgccgctgtttgatgaagagggcgctgtcgcccatcgcgcgggccgtgttctcgcacgtcgcccgttggtcttcggccgacatcagccgccagagcttgcccggttgggtgaaatagtcgctgtcgagttcccgttcgtcgtaattgtagatggcaccgttcacctccaaaggcggttctttcaggttcgggctgtcctgccattcgccgtagctgttcggctggtaggggatcgtcgctccgtaattgccgtccgtgcgcatctgcccgtcgcggtggtagtcgtggaacggacagcggggtttattcacgggaatcaggttgttgttcacgcccagccggtagcgctgtgcgtcgccgtaggagaagagccgcccctgcaacatcttgtcgggcgagaagccgatgccttcgatgacgttcgcagggttgaacgccgcctgttcgatttcggcgaagaagttgtccgggttgcggttcagttcgagaatacccacgtcatgcagcgggaaatcgccgtgataccacactttggtcaggtcgaagggattgattttgtagtttcgggcctcctcttcggtcatcagctgcacctgcatcagccagcggggataatcgccccgttcgatcgcttcgaacaggtcgcgctggttcgactcccggtctttggcgatgaccgcctcggcttcggcgtccgtgaggttcttgatgccttgcagggtgcggaaatggaatttgacccatgtgcgcttgttgtccttgtcgtagaagctgaaggtgtggctgccgaagccgtgcatatggcggaacgaggccggaatgccgcgcggactcatcgtgatcgtcacctggtggagcgcttccgggaggagcgtccaaaaatcccagttgttgttggcacttcgcatgccggtgcgcggatcgcgtttgatggcgtggttcaggtcggggaatttcagcggatcgcgcaggaagaagaccggcgtgttgttgcctaccaggtcccagttgcccgtgtcggtgtagaatttcatggcgaagccccggatgtcgcgctcggcatcggcggcgccgcgctctccggctacggtcgagaagcggaccagacagtcggtctttttacccacctgcgaaaagatcgaggcccgggtgtatttggtgatgtcgtgcgtcacggtgaaggtcccgaaagctcccgatcctttggcgtgcatgcggcgttcggggatcacttcccggtcgaaatgggcgagtttttcgagataccatacgtcttgcagcatggcggggccgcgcacgtcggcggtttggatgttttggttgtcggcaatgggtttcccgttttcggaggtcagtcttttcttgtccatatcctatcgttttttgtcggcatgcagaaaatgccggaccggtttatgattgaatttcatatcgttgtaattcagagcaaaaacattgccatacagactggcgttgcctctttggggatatgttttttctgcgaggagcggactgtcggagcgaatttttcagggaaatcgactctgtttttcgaggatttggaaaatttcactatatttgtcccgttaacgggggattagctcagttggctagagcgcttgcatggcatgcaagaggtcacgagttcgagcctcgtattctccaccaagcaaaaaccgcctcaaactaatgtttgaggcggttttctgtaaaagagtccgtgttggatcatcctttttggacaaacaatggacaaacaaaatcgcgatttataacgcttatgggccgctattttctgatcgttataaactctgcgtcgataatttcggcgtgcggattgtggtttacgatggactgatcacgcgacttgacgcgcttcgttcgccaaaggaacccgaggaaccgcgcatacttgacgcgctccacgtaggtgatccggtcgcggcttgtgacgtcggccttgtagctattatcggggaatatgcagcatgaaaaatcgagccattcgtcgtgatgctcggcacaccttgccggaacctcggaggacccgtcgggcgcgacctcaacaaaaacggtatcgcgggcctcgccctgcaacttataaatggtttgctgttgtatcttggtcagttgctccaactcctttttcttaacgcccatgtcgcggattaacgtggcatcgtcggcgcggtaccgctccaactccgccacccgcagctgcaattcgccgactctaatggcctgttcgccgcttttggtttgataacgttccacctcgcccagcagtacctctgtgttgttgcgatatgcgtcccgctccctccgcaattttttgttttgatggatcaggattccaaatgccgtaatcacagccagtgctgccagtgccacgattagatactttttcatactttcccaaaataacggatccagttgaacgatttgcggctgcgaatatattggttatctccttcgttggcgtgtgcctccatctcgaacatggatgcgtaataggccgtgtccgccgctgcggtcgcggagagcttccgccgcacggtgttatacacccacgaaatccccgcctcaacaaaatagatgacgtaatagagcaggagcgccatgacgaatggccaaacgccccatccgaacgccaaagagagcaccaaggcggcaagcaacgcgacggccgtaacctccatatactgctcgacgtggatggcctcgtggttcactgcttttgaactcaacggctgcgcctgtttgcgcttcgtgcagatgaaaccgaaaatcatagctgtttcgtaacctttccgccataacagcaggcgggccaacaggttgttgtaatagacttttctcatggctaaagtgattttacgatgtttgccacggtgtcgatcaccgaggccataatagcggcgtaattcggcgccgtggcgtattttgcgcccgtgttgtccaccaggcggcgggcgtactccttggcatcaccccgatagggccacgcatcggcgtacatcggtttcttcagcagtgccaagtgatcatcgaggcatgcgtccacggtcgggtacacacggaaaaagcggtacacgcgatatttgtaccgatcgggcgcaacctgctcgaccgacacaacccgctcgggagccttgaacgccacagtcggggtcttgaaatactcggttgtcagctccagcgacacgtcgccggtccagcttcctttcgtgatcccaaaaatgttgttaccgatccctcggatttcccagcccgtttccagcgctgcctgcgcggttacgaatagggggctgacgccgccggcctcggccagtcgtaccgctgcggggtacacttttttgacaaattcgatttgtttgttgttcattgttgttcgtggtttttattatgtgttttctcttgtgatccgaaaggcggctcccgctcgggacaattcaccttgcagcacttgtacagagtaagcacggccttttgcgatgccagcccgtcgagttgagagcgcatgttgccgatcgttttataaagcccctcgattttgttgctttggtcatccacttttttttccgatcgctcgaacagttctttccactgcgacgatacggtggactcattggccaactcggccgcccgtttcttgtgcttgcggtcgaaaaaaatacctatgccgccgcccgcgctgattgcggcgatcgccgcgctgatgattgtcgtccagtccatatttgtcgttatattttattccgataagaccgctggatcgtccgaatggcaaagaccgactcgtcaaaccgttggcaaaaaccgaacggtcaaatccagggcataatagtttgttgttctctaaaaaaacggcggtattgcgatcatatcgccagcagtaaaaaaagaccgctggatcgtccgaatggcaaaaaccgactcgtcaaaccgttggcaaaaaccgaacggtcaaatccagggcataacggctattagtcagttaaaacagcatattccaatttcccgtaggatgcactgcatactaccttaaattccttgatctcactcacctgaatcccatttttgaatgccgcaaatccgatgttttttatcataaaatttttataatccgggttagggctatcaggtttgtcaaaatctgccttttcgatcttgtaggttaagcccaagcaaagccgggtggtttccaggcccgagtcgtaccaaaacatccagcctacaatgtgcccaaaacttgctcgggagttattgtagattaatgtcgattccttgaatttttctatgccaaactcagttatcgctttgtcgagcgattcgtttccaaattcaagggcaaaatctgcctgcccgatagataccccatgcttgggatgcctccaggtcttggatattttacgcgtcgatccagtaggaccgctcgcaaacttgtaccgcccttttgtccggcggaaaagataaattttatagtcggcaacattatccgcgtcgcccacgccgtaaagcgatattatcggccacttacctttatcctcaacgtcgccggttttatagttgtcaatggtgagcgtgatggggtatttcggggcttccgttggggtttttgccataccggcgccgctgatctcccacgaacctttgatggtcatgtattcggttttctcgatcggctgccgaaccttgcgggcgaacaaacggccatcggttgtcagcagcccaaattcggcgatcgactttccggcggcgtccatgtagccaaaggtgaagttgaagcgcacggtgtcgggcacggggtactcgaccgtctgcacatcgacgatagtggggtcggttatcgacgtgtcgttctcggtcggcgcggttccgttcgttcccgccgcgacctttgaaatggccgcatttggcaatcctgccagcgcctcggcggcgatctcataggccccgtttacgatttggttgctttgttgcaggctccacaactcacgtccctgctggtcgtaagcaaccaaatgcagaacaccgtctattggttttacgatctgcttcataattagaaatctgtatgattgtttgaccccattaaaaaatatccaatattcgttttagccaacataaggcttacatatccaccttgtgagacaagggttatattgtcggatttataactatgaccttgaaactcactttttactgatacattaacagtaataatatcgccatccgatataattataaccggaattatcgcaggcatttggctgaattttactttgtcgataccgatgtcgccgcaatttatttccaggtctgcattattacctgacgatgttgcattcgtaatattaactactgctgattgccatttcccatttacggtattatatgtaaaaagatcagttatcggaattgtgagaatgttggatatgctgatatttttaataccatccacaacacacggcgctaaagtcctttcaagtagctgcgcagttattgcatttttctgtatgacccgaccggtgattatttcgtcggcgaaaatgctctcatcgttcaatgattcctctgcgatttggactgctgtaatagttctatcggcaatttgggcctttgtaatagttttatcggctatctttgctgcggtaatcttttttgcgccaactgtcggattcgggtacgtaccggcgagatcaccaccggcgatttcggggatcaagtctatcaccttgcccaaaaactccctgatcttcggctcggtgatctcgcccgtgtcgttgttcgggaaatactgctcaagcagtccctttaagtcctctttttgtgccatattcttgcctttttatttgaatccacgattaaaccccgccgagaatgcacgtcggcgggtggtaacttcaacattcagccagtcgttggtattgaagactatttcgctggcctcgattctctgataatagcctacttcgaccaggtgcgaccgctcatttttatagaactcgacgaacaggtgtatttttcggctctcctcggcggtgatgtggcggctatcatccgcctcaacgaatacgcggaaccgcgcccagtcttcggggctttcagggccgccgggcagagccgttacgccctcctccaaaatgacgatcgggaaccccaccgtgcggcacgcttcgcgaatagcccacggcgtaccgataaacttgtgcagcgcgatggacttcttaatgatgtcccgctgttgctgttcggtctctgccattccgaatccttgcaacccgtcgatgtcgaactggtcggcaagatacggcaaggcgctcggggctaccgtgtccaccaagtacggcaggaactccgataggtcccagttgtcccatcggtcggccaccatttccgaaaaggcccgtgccagttcgttgtcgctgatcgcgcttgctatgacgtttttgtcatccacggttaaatcctgttacgttcacggttattcccgtgcaatttggaaattgttcgtccgatatgatcaggtttgcggccggcgcgacgaccgtaacgtcgtacacgctggacaaccggcacgcttgggcaatgtgcgaccgtatgatgtccaaaccgagctttgcccgcttctcctcggcaaaatcttccaaggcgctggtgatacttgcccgctcggtcgcggcatcggcgccgtcgtacagcaccacgtccaccgtgagcgcataatcctcgcgctccggcgccgatacgattaccgtgtccgtgagcggccgcacattctcggcgttgcacacgttgtacacatccgtaatcacctgcgcgggcgtttcctcttcattcgtcagtggaacgatcaacacactaccgggtaccggcgatgacacggacacgtcggtaatcatggcgttggcacttttcgcgtaaaacttgtaactcgaccgcgatcctgccgatgaatattgcgatggcgccagtttgatgcgctcacggagctgcgcgtcgctctccacatcggaacctccgcccgtgacgtcgatattttctactgtcgatacgaacgccagcgggtccagtattttgttaatcgtaccgacggcataaccattccccaccttgcccgcaacgtcggccaaaacggacagttctacggtcatagtggcgggggcgattatggcgtcgtcgatcgtgcggaatgtttccaaaccgtcgctgctcgatacgcgggttccctcgggaatcaaaacggagccgtgccctgcaacaagagtgaagcggacggtacacccagcactggccgccggcaaacgctcgacggccaccaaacccgcgatgtaatcgaggatcggcgcggtgctgaactggtagagcatttgccgcatacccgcattaaagcggttcacaagcagcgtttcgcggaacaccacgaaattgaggatcaactgctcaacttgggcaggttgcaattcacgccccaacagctcctccagctttgctttgctctccgccatgattacggcgggatcacgttccacgaatgttgggatattgttgtcaatagccattatatgatcgttgttatcgttatctgttctgccgatcctaccaccgtgccctcgatcttaaaaactgtgtgggcggcatcgttacggctcgcggaaatgcgggttacatcgaggcgcttttcccaccggccgatggccgtggtcgcttcgtagatgatttttcccaacaccgatggcaggggtttatctaaatattggtacacgttgctgccgaactccgggcgcaacggatcgctgcccgggatggtcgtcaggatgatattgatggactgtacaatatcatccaccccctcgacgatcgccgccggatcgtccatgctgacctgccagtttcgtgtgtcgttcggtgcaatcatacggcgcttgcggttatggttcccgttactgggccggcggtattcgccagcgtgatcacggcggtatttaccccctcgacgatcgcggcagccaccgcgttcgtgatggactcggcgatacgatcggcggacgcctcggggttatctgttttgtctcgttcggcgagcatggcggccttgatcgccgctttcaacgctgatttctgtacgggcatacgcttatggtgttggcggtcccgacacgcctgtactggtcgggtgcttgtgtgttgttaattttattttctgcgttccggcggtaacttcaacgctggcggtgatctccccggtaacagtggtgtcgcccgtgatgttcacctcaccctcgacgttcaattttttgcacgcgatcgacagctcggaatccggtgcgttcacgctcaacttatgcgccttggcatcatagaacacctcggcgccgtcagcgtattttacgcccatagtgtcaggtccagcccagtcgggcggtgtgtccgtatcgctccaaagtaccaatacaatggcgccctgctcgcaattctcgtccatcgaacacagcacttgcgcatttacctcgaccggtatccagtgcttcgttttgtaggtagccatagacgggatagccagccagccggaaacgatctcgttctcgtcgaacgaaacacgcgcatagcccaggttctcaccctcgccgatctctgatattatacccagccgaaacatacctatacctctatttttctaattgtcgccgtggttacgtacccgctcgaattatcgaggtcatgagccgacgataccacatgccactttccggaaaacttgccgatgtcagtcagctcgatattgatccctgccaccagcttgacgttccccgcaacggtgatgctccccgttattttgtccttgtttttttctttcaacgcacccttggccttggcttgggcctgcgtctcgttctctaccgtaacgtctccctgccacgtgtctttcgacaatgtacccttgcctccctcttggtctgacggctcgatcttccaccgccggacgctgttggtcttcatattgcgggtcgctacgacagccccgccaaatacctggctcgttttgtcagtgaacgacgcccggctcaattcgtttttgtgaatggtcatcaccacgggctgagactccagttcctcggtgtccataaacacaagctgatcgccacgaacggaaaatacgatcccgtactctctggccagcccgctcaaaaatgcgaggtctgtctgcttctcctgtgtcttgcgctcgacttctatcttttgcaggtcgctgacattgcccacgagcttcagcccgtgcttcgtcgcaaagtattgggcgatctgcttcaacgactgcttttcgaacgccttgctgttcttcgagcgcagcgccttggatatagcggcaccgatggctttgatcgtaaccgtatcgggcgggaactccagcccgatctcgtctatctcgaaaagcccgcaatccagcggagcgtcgggcgtgccgatcgatacctccaacgtgtcgccttgctcggggtaccatccgtttttccaatggtcggcggtatcttcgaacgtcagcgtcaaatcgtcgctttccgcctcctctttgtcggcatacgacaatcgggagagatagggcgacacgtcggcggttacgttcttcccgctgatagtgattttcgcaatgactttctctaacgtttccatggcggcaggtctgtatttacgtgcatatcgctgtcctcgacgatcgggatcaccagcaccgtgcccagcgggaagaccgccgtaagcggtatgagcgggttggcgtccgatatgatggcgatcccgtccatgctgccgtaaaacttggcagcgagcaggtcgatccggtccccatcaacggtcgtatagttgaaactcgccatttaattgcctccctcttttgttcctgcgaaccccgctaccggcgtggcgctggtcgttactttttccgcgctgtcggacaactgcccgacattcatctccagcaccgacacatccaccacgttgtcgatttttgcgaggttgctggcatatgcaatcgcctcgtccaatgacgtgggtaagttgcctgcgcggttgattattttcttggtcgcctcgactttcgtcttggccgacgcatacaacccttgtgcatcggtggctaactgctggacctcgcggaccccgcgctttaggctggtggttctgcttttcactttggcgatcgactgcttcattccgctaaccttttctttggctgcggtcacgtcgctggttatctccgccgccgggcttggaatcggcgcaacaggcgccgccgcaatcggcttctgactactcaacgcccgcccagttggggctgcttcctcttcgccgggactctccagcaaattcacggtgacggttgccagctccacccatccatccgccgcgcactgctggttggcgatgtccaaactcgtaataacgaatttcccgacaattcgcccgtctccggtaatgtacggcagcacctcgaaagcgtgcatcgacgctttcaacgcatatatctcggcctgcggatcacaaaattctgatgaatatgtgattgtcaggctcaactcccgcagctcggcaccagtcggctggatggcgtctttgtcattgacacgagggatttggccgtattttacggcatctgcctcgctggtcgatacgggagttttcatcccttgaaatatgtgatctccgagttgtgcaaacatgggtaccagctattacgcaaaggacaaacgtgtcttgttttcttcatatttacgaatcagttccatgatctcgttcgcgtgctgcttcagcatttttccgaactcgtcccgcgcctcccgcgtagtcgatccggcgaatgtgatctgcggggcataggtaatggacgggccggtattcccgccgcctacaatggtcgaggtattcaccgtgctggattgcatcgactgcgtgattcctcgggtcgcttgcatggccacgccctcggtagcattttcgacgattgcaccccctcgatcaaggccaacgaccagcccctgcgtgatattcagaccatattcggcgaacaaacgggacggggaattgataccgagaatagacttgaagccgttggcaatcctacggccgatattcttcattccctcgacaaccttatcgaccatagaggttattccattccaaagcccttgcaataggtttttgccccactcataaaagcgggggccgaggttttcgaagaacgtccccacattctcccacgcgccgcgcatccattcgacgggttgcaggttgctgaaccagtctttgatcccgccccatgcgttcgaaatgccgctcttgacgttgccccaaaggttggagaaccagcccgtgatcttatcccaatttttgtaaatcagaccgtgaggcgtatagttgagaaatactgttttgatcccttgccaagctttgccggttgcgtttttcacaccgttccaaagattggaaaaccagcttttcaccgatccccatgccttttgcactccctcgcgggccttgttgatggtatttttgataccctcccaggctttccccgcaccggccttgatcccgccccacaagttcgagaaccagcccgttacagtgctccacacctttttgatcgcttcccacgccgctttgaatatcccgacgatagcgtcccacaactttttgaaccacgcggccacctcgtcccagtacttgaccagcaacaccacggcggcgataatcgccatgatgccggcgacaatccacaccactggacacccgtacaaggatgtattaaataaccactggccggcggcggcgatcttcgaccaaacggagaataacgcatattgcacacgaaacaacaacatgccgtttttgcactcgctgacgattttggtgccaatttttatggcatcagatactgttcggaataccttaccgaactgcccgacgatgaacgtcacaccgccgatcgcaacggcagccgtgcccaatatagccagccacttgccaacggtcagcgctatattgccgatcgtggcgaccagctcggggttttcctgtatccaccttgttaccttatcgatgacctccgcgattttttcagcggccgccgacaatgcggggaccagcgcgtttccgatttgcagtttcgcgcccttgacttgttgtccgatattttcaagctggtcgctaaatgcgtcgcctttggcgattgcctcgtcgctcaacacgagccccatccgctcggcctcggcgtaaaacgctttcagaccggccttgccgtcgttcagcattgggatcaggtcggcgcccgacttgccgaataattcaactgccaaagcggtctttccgatgccgtcctcggtgttgtgaaaaatatcggctacatcctcgaaaatctcgtttggctggcggagatttcccgcgctgtctttgatctgaatgccgagatccttgaacgtctgcatgtaggttttattcccgccagctgcctcggcgatcattctgtcgaatttcacgaacgacgtggaaaccttttcggcttcgattcccgacatctttgcggcataggcgagtttttgaaaagcctcgacgcccataccggaacctcgggccatatcaaacatatcgcccgcgtagtcggcggtcgcctttccaacggacaaaatacttgcgcccacggctgcgctggcaccgaccatcacaccgccggctttcatcatcgagcgtccgatcttgccggtcgtgcgctcgaatgctgaaagtttgtccgtcgattttttgacggcctcatccacgatgcggctcattttgtccgtagcggacaaaataaacgctaatttcagagtgttggctgccatgtgtcgttatcgcttttcaatgccggacaatacaacccggcggggtgttgtgatctctttttcgtaaatctcgacggcacggtccaagtaggcgaaataatcctccacgatcagatcgagaacgctgtctattccgccgccggtgaagtgtgccaaaaaaacaatatccgcgtgtgggatttgtctgattgacacccttgcgccagcgttggaccttatccgttttttgagatgcccccctctacctctttttttgcgtcggggaaaagaaaatcggtgatcttctccagctcctcggaggtgaagccgtccatcagatcgtcgtaaacgatcggctgaccgtttacgaggattttagcggcaatcaggtgcatgccgcgctcggcgtccgtcaggctcttgttgttggccagctccgtctgcttgcgtaccgtgatcccgatctcggcgatctcggtgttggcgtagagctggagccgccggcggactgataaatccggcttacgattcagtgcttgctgtcccattacaatccaaggttttgcctacgttcggccagcaagtcctcgccgcctactttgtagatgttgttgattacgtcgatctcgacgatctcctcgccgtcgatctccagtttgtagtactggacggaaacggtggactccagttcggtgtcctccttggccttgaatgcgccaccggggagcgtcttggagtacccacgtatgtacatcacgatgggtttctcgtccgtgattcccgtgttgtcgtactccgctttgctggagcggatcatcaggtccacgggcttgaggaaattcccgaacgccttttgcgcctcgttgtccggatacgtccatttgatcgtcgtttcgagtttgtcgaacccgttgaaaaactcggctgaaccaatcatgcccatggccttgtaatcggtcataagggccgtaatggtcggggcggtgatctccgacgccagcccgtgcttgctggcattgttcacatagacgtttgcgtcgtaaacttttgcgatattcatggctattcgatggttgagagtttgttaatgtcgattttgtggtcgaacgtcatgcgctgcatcggcacggcgggcgtccactcgttggaaaacgtaacgtgtccctgcgccagctcggtggcagggtttttcgcagggtcgaaaaagcactgcccgtaaacgatcttaccctcggctgtcagtcggttgtagtactgatttacggtgttgcgaaccaggtcgatgtcggcctgcttcacctgcttcacgtcgataaacttggcgcaggccatcgtgatcgaacgcttcatgatcatcagcgaccggcggacgcactcgaacgcatcgggggtggtggttccggggaacgccgtggtgtagtttccccactccacgatcccgttgccgtacatattgacaaccgtcgtgatgccttgtgcgttcagcaggttggcctcacacgttttatctgagagcgcgaacgtgatgggcacgtcggtaccctcgatccccgtgtaggcgtggttcgacgatgacacatgccatccttctgttaaatcgactttggcccgcaaacccgccgcgtaagctgacaccgggagcgtgaggtatctttcccctgggtcctcgacatccgggttatattccgggttcgcaacaaggacatgcgggaaaagaagcttttgcccggctttgagtgtggcaaagtcaccctccgcaccgcgcgactcaatggcttggttgaagccccagccgtcgggtgtgtcaatatatgccatcgcctcggttttctcagtaatgacaatcaactcctgcttcactgcatccaatgcggaatatcgcggtgcgatgtagatcatcggttcaaagccgtatttgttccctgcggtctcaaacagtttgagacccgttcgctctcccgtctcggaaatctcgcccacgatgtcggcaccggtgatctcggcggtggcgtcctttaccttgacgacgaacaccaaggcgctaccggcggtgctgtcttgcattcgaatcgccttaagcgcttcggggatggttccttgcgtaccgaatgcggcatcgtccgccgcgctcttgcacaacgtgaggacgttggtgtcgcccttatccgctgtacccaccagcccgataaccgccgtaacgatgtcgttcacgggcaccacgtcactggcgacgtttacgtgctctataccatgtaaaaaatctgccatgtcataaaattgttatgccgtctccggcttggtttataattgtcggctacttctttttgctgccagccggctcgacagtcgtcacggccacctctttgatttggcggcgggctaccatcgcacgaaccgcgatgtcattctccggcaactcgacggtatcgccttttttcagcgcatactcctttcggcccgcgccggccttaacgctgaaaacaacgtaaggacttactacctcgtactttttcatttttcagtaaattcgtttttgatttccttgatcgccggcacgccatcggggcggtctgcttcgacagaataggccgcaaacgaaaacgtgagcgcatactgccaatagttgtgcaggcccgaaacatagccgaacgagttgaagtaaatgggtgttttcgcaccctgcatccgatgccccaaaagacgggatttcgccgcctcgtaaacatcaaaaagacccagttttccccgccgttttttcgcgcggatgaatagttcgcattgaacggttcccagttgagccacgacggccaactcctcgcgttcggcgaactccgtaccgtttaccagcacgaaaatctgcggtttctcggtctgacgcggcaactccagagcctcgatcttgggtaacggcttgacatcgacacccggcatctgcaacaacgtgaccagctcgtcctcatacctttcgtaaggggacatgctggcgtctgccttggttgtcattggttgctccatgatctattcttcgctttcggcgtgcggtgtcaaatgcgccacataggtttttccgtcaaatttggtgtccaccgcagtaatcaaataccgctttccacgtatttcgaggtattcagtcgtttcggcatccacggcttgcttcagcccgacgaaattaccttcgtaatactctgcggtggccgtgctcggtctatattcgtagccctcggagtctccgatctgcgtgggttcgctcgggtccttgaacaacgcccgtccgggaatatttccccgatttggggatagccaaacagcgggttcgcccataaggttggaaatggtcgaagatgctattttggccatcctgtcaaatcggttgttcatacgctcggaggttatacgttcaacttgaccaacaccgtggtatcgcctgcgtcggcagcctcccaagcgcatccgacagccttgttatcctcggccgttgccacaataccggaaccgtcggcagcagcatacaccttttggccctgcgtgattgcaccggtacctttggccaattcgtacacgcccgtaacgttcaacacgacggtttcgtccacggcgccgtcagtaacggcaacaccagcgacgtcaccgattacgcgtacatcaccgctcttgatcgcagtttctgcgactttatactcgatggtcttaccatcctggatgaagtttttcattgctctgtatttttagtttttgcttaaaagaggggcaggcacgataaattccgcccctgcgggaagtttgccgttacgctatttccccgctgctttcacgatgccacgatagtcgatcgccgcagcaccgaaatcgccacggacggcatagtccatggagtcggttttgaactcctctgtgctgtccacacgcagaccctcgttgccctccaggtatgcgtagtagagactatccactgcatacgggtcggccatcagataccaagcttttggatcggtcaatcgcggctcgacgatcacgtcgaacgcaccggcgaaaacgttcacgtcctcgaacttgacgggcgttgtcgctgttaccagttttttggccatcatctcgttctcaggtgacacaatgaggtaacgtggcaccatgcgaataatctgtcccgcgatgtctttctgcttcatcatcgccgtctttgccgccgcaagactctcctcgcttaatgcgctgctggcacccgtgaggaggttgccgtgggtagcatcgaaaatccccttgccgtcggacatcttcacgttgtcggtcagcagaccccacacgaggtttccacggagcatatcccaatggcggacgaatgccgacgggatgatcgagaacacgcccaaatcatcgttgatgaacgcctgccgggtgtaactgatgccctcgccgaacgtctcgacgcggatctgctccttgctttccttaagcgttgtgtacttgatttctccaccctcggggatcttcttcatgccattggcgacaccggccgagtaaagaccgcgtgcacggaaatcgtccacgctggtctgtcgggcgattttgtcccaaaactccggtgcgaactcatactgtgcccgcaacatcttgttgatcacaccctcgaacaacagcggaaagtcgctggtgctgtgcgcacggttgaaaaccattttggccacttcggaacgatccaagcctcgggtgttgataccgcgctcggacaacagttcgcgcccgatctctaccatggtcatgccgcgaaattcgcgggcgccggcgtccaacgagaacttggacggataaatgcggtgcagcagtgcgttctccacggccatacgcttcttggtgccagcatccaagccggtcgcacggacactatggttaccgttcacgccgttttcctgacttcgtttagccagccgtcgcataatcgcggtgctgcactgctccacggtaagatcggtaccgaccagtgccagcgcgtaatcggcggaaaggccagcggcacgggccatttgctggatcgcttgcgttcgcttgcggttctcttctgtctgttccgttcctccggtagcttcagttaccgcagctgcggcatctttagcagctgcggctgcatcctcggctgcggctgctgcatcctcggccgctgcaactacatcctcgttcgttttggcttcgtcggagtcagtcggcgtgacctcttcctcaatcagtgtgagtgtaatggtatcgcccacttcgccatcggaaagggcaacgcccttaacgccatcaacggttacgatgtctccctgctttacgggatcgccctcgacgacgtactccatggtcttacctgtttctgttgctctcgtttttttcatgttggtggtggtatttgtgattcgtttgtttatgatttcgaccggatgctgctgttgtcctgtgcggatgccgctgtcgatgtcggcgggtactggagcgagggaaatttcgatcggcatccagtcggtagcccggtagataggccgtgcaccgtttgggcgctcctcgcgctcgaacttgtagatttcgtagccgaccgagatccctttgacgatcccgtccaccacatcctggaacagtccggccacctcgggacggctggagaaacgaacgcgagcgcaaagctggcgcgattcgttgatccacaccttgaccgtgcgaccgacttggctgtgcaccgagtacgaattatgacagtccaaaagcggaagcccctgatttgcgcggtccattcgaacggcggatgcttcgcagaccagcatttcgtcgtagtcttcgtcccagctgaagcgcgtaaccattttttcggtcgcgcaaacgacatctacctcgcgggcctcctggtcgatggtcgtaggctgcacgagcgcccgcccgtacagcacgcccatggtgcggttattcgtttcctgttttgccattgctattttctttttggacgaccgtagcggcggtattcacgctgtcaatggtaatacccaactcggccagccggtcgatgtcctgtttatattctttgaaaaactcctcgggttcgcgccctatctctcggatcgtctcgctgatcgtcgcaagaccggccttgatcctatcgacctgtgcggcggtctcgcgctgcggatcgagctgctgaatgcgaggtgccgtccagtcggcggatatatatcgggacaactctcccttgatcatacacgcgctgataaaccaattccacacgggggcgcaaatctgcggtacgatcataaaatactgccagcttttgaagttggccgtaatgtcgattttcgccatgcgccccgaggtaaaattcacacggctataatccatcgtcagcatttcgtaggtgatgccatagccagcggccattccctgcaatatgcggctggcgtaagcatcgtaatcggacacgctgggcggattggcgaactctaccgattcggcagctccgaggtgttcgacgatgccaggctccaagcgctcgatacctatcgcaccatcctcgccaccgtcatcttccgaccccaatacaaatgcggcgaagcacgcggccaccttttgctttacgagctgggcatcctcgtagtcggaaaaatcgctcgttttcataaacgccgacactccgatcggcaagcctcggacctgtccaggccgcaacacctcgaaagcatgtagcacatcctccttggggtaaaacttgctggcaagcgccggtgcaacgataaagctgtcgccggggtggtaatcaaaaagccagtatccgagcaggcgcccctctttgctgaattgaaccccaagccgacaataacccatatcgttgctgccatttcgggtgtggtcgagctggtcgccctccaaaacttgcaactggagcggtagcgggttgttgtcgtcgggcatgacccagcgtctcaaaatcaacacttcgccactctcagcgatggaccgcatcgctaattcctgcaacccgtaaaatgtcgttttgccataccagtcgcaggcggtcgaattggcccatttgctccaaagtcgttttacgagttggcaagttgccaaatcggcgtcaggcgccggctggatgccatcgccgatcgtgtgcttggtgatcgcttcgacagcccgccgcgcccatccgttgttacggaccatattacgggaacgatcccgcaacgtaaccagcgcggccgatacttcgctattgacactcgtggactttgccaaccggaacgccttgccgcgacggcctttgtcggccgcctcataggcccgttttttacggctacgcgatatttcaaatgaaattctcatcttttgctgaaatagcctcggtcaatacaagcgaggcgacgacggcgcaagcggcgttccggaaacaactcctcctcaatcattcgaaccaaatctttcatctcggcaagcgaccgatagctcacggttttgtcgccgtaggttatggttgtcgcaccggtggcgatggcctccttgagcgcggtatattgttcgattgtaaaagacatggcagcgtaacgatttgcaacgaatttatgagaggtgttttacattcacaataccacgcgaaaaggtttaccgagttctcggtaaaccttttctaaatataccgacatctcggtatatcaatcatcccaaaaactgccacctcgacggcgcccgatgctttcgtcgttacgagcgtctctctttttggcggttgcaccacccatctgcgccaaacgctgtgggttcaaccgatccagcccgaggatagccgcagcagcccgagcatagacacgacagtcaagcggttcgttgcgctcgtaccgcttcacccattgcaactttcggtacccccgcaccaccttgacaacctgctcctcggcggtaaggccacggaaatagtgttcgtcatattcgggaaaatggcaatagttcggcggcgggacgccgttctcgtccttttccagccgcaggtgggcgtataactccgttttgaggaatgacacgccgatattccactggcgcatctttccgacctttttacccgccttggtgatgtccacctgcttgggtggtgaaaacgccatgccgaggtgatcctgacccttgatcggtatgacgcgatcaccgacgaaccggcggcaaaaggtatggacgtgcgtcgtgttgtagccggtatccaccgccatcattcggataggaaactccatcccgtccttgcgcggccaccgttcacccacgacggctgccaaatcgtcccatacggcggttccggccgtgtccccctcgattacgcggtagtcgatcgaatagctgcgtttgtcggcacaccagccgacaatctctaactccaggcggtcgcgctgtacatcgacaccggcggtgaggaagcacacatcggcgggcacatggttggttttgtactgctcgcggcggttgtaaagatttttgtacggcggcgcctcgcccttttccgcccacgtctgcccgagggttgtattcacgaaaacctttaatttgctcgggttctccttggccgcaatgaaatctcgcgcgatctgttcccagctatgccacccgtagggcgaatagagactattaagatggaagccaatcacatcgtgatttacattttccggcttggcgggcacccactggccgtttgctaacatggtgatcttgtgccgctcggcgatcaattcgccgcaatggttgcacttgtattttgctgtttggggcttgccctcctcccacttgagatttgcgaataccagcggctgcataacgccgcagtgcgggcacgggacatgatagtagttttgatcggtttccaaaaattcccgttcgattgccgaaagtccctcgatggtgggcgtactcaacatgaaaattttatggtttggaaaggttcgagtacgggcgatcgccaagtcgatcggcgatccctcgccgtccaagtcctgcgggtaagcgtccacctcgtccaaaatcaaattccggatagggacagaccgtaaccccgctgcgctgttggcgccgaccatcagcagcagaccgccgggaaaattcttttgcgtgatcgtgttgttgctgtcgcggctcttggccggagccacgcgctgcttcagttcggggcaattctcgatcagcgggtcgatgcgtcccttggacaaccgttcgaccattttgtcggtcggctgtacgaacatggtgggcgccggcgcgatgtgcatagcatagcctacgaagttgctggcgccctcggttcctccgatctgcgcggcctttacgaagacaattttgcggtgcgagtcgtgaacgctcaagcaatccatgatgtcgcgcaggtagggggtgcggctcgtccggtattggcccgattcggcagagctgaccggcgacaaaaaccggtatttgtccgcccattgcgacaccgtgatccggtcgagcggtcgtaagccctggaaaaacttggttatctcgttgaaaatggctgtcattggtcgattcttgtttgaaaatccgcgagcttctgcaacgcatcggcgatcgcgtcgtatatcgtgttgtgaacgattgcccgattgtcttccgccataaccacgtccgttattcggtcggggattgcaagcaatgtgtcgcgcaattccttgccggcggcgaaaagttgggcatttatgcgctcgcgcgacaccagcgcaccctctttttcctgtaattccagctcggcgatcctggctttggcgattttttcctgtaattgggcgtcctcgtaggtcatcgtagcagttgccacagccttggccgtcggttccggctcgatcaccgctttatcaaaggttttgatgtagcccgccagcgcgttgcggaccttgcgctggttggggtgcgccgagttcagcgacttataccagcatacggcggcctgttgtgggttcaggtaatacggcgaagtcgcggacgtcccgacgacatccgcgaaattgtccggtatatatccgcgctttatggccgctgttatggtcttggcgcttattccggttgtttcttcgaaatcagatattttaacccaacctttgggcgcttttttcttcattcgtatctgcttgctacctgctatgataattttttcctgctgactggcgaaaaaacgcgatgccgactacccccgatgtagggaccaggaagaacctacaaaatcattcttgttcgtaccttaccggatcgggtttctcaaatccggttttatttccgcattcgggacattctacataccacatcgttacgcgatctcttggatcgaaaaaggtttcatccacatcggcggcgccatactcaaattgacacccgcaagggcatttccgtacatatatcgccatcttactactgttgccgtgccgtattatccgtttcatgtcatctattttttgctgcgatcttattcacgcgactggttaatattccgtgtacgcgggccgttacctcgttgcctataaatcgcgaaactttcggccaaacgtccggggctaaactcatccggaacgatgatgtggtcaataattcagttattaaccagccctttgtatttttacgtttgggtggaaatttcccgcgtacaaaatttttgccttgatattcacctctggcaaataccccctcgtggccgctggtcatggtagcaataaaggcatggcgaatcatcgttgttttacccttgcgtatcactaccgaaatgtgggatcctgattgtttcggattaaatgcaatgatcgggatgtgacgttggtttactttaattccgccccataatctactgggtttggccttcggcgaaactttaatctgacggttaaggtattttttattgatattgtaacgctctttaatgctttttttgatgagaggtaccgcacccgacaacgcactattgacgccttgcgctgtgccgcgcaatatctcattgggggatagcttgctgcgaaactcgttttgtattcgctctacctcgccgcgcttttcttgtgtgatcttgatctccataacgtcagattattgcaggggagcgtccgctgtgtgggtggccgcctcgcctcgttcgtattctttcagtttctcgtcgattttgaggtacaaatccaccggctggggcgtccggcgttttagatcctcataccactggcgcgatacgccggcctcgcggcacaactgcgaaatggatacattagccgcgttcgcccgtcgccggatgtcgttcgccaagtctttgtcgctttttttcataatccaaaaaattataaatacattgatttcaacgcattccggcacctgccatctctttcggcccgcagatgcaactccgccatgttctgctcgacatactcctgcacattcgcgggacacttgccgctctcatacatggccagtagatactcggcagggactttcgctattacttcgcccttgtagctgccgaacggcatacggtcggccgtcttctgcttccgatcggcagcctcggtgtccctgcgttgctcgatggcgggcttgtgctcctcaatgtaccgcgctacactttccgaacatttgccgttctcatggagccatagcaggtaatcggcggggacgcccgacatgggacgccccttgtatttgccgtatggcatggcgctggtgtctgtcagcctccacatagtcaatagcgtttcccgtgcttatatcctcggcccttgttgtattgcattttcagcagaacgtgcatttcgaggtcgatgccgagtgcggtggataaatcgagcaggcgaatagtcgcgtcggccagctcgtcctcgaacgtgtctttaacgtgtacctcgaacttttcacggaacggaaagatttcacagggttccttatcgaaaaaagccgataagtcggcccgtttgttcttacgatcggcttccagcgcctcggcgagttccgaaacggtcagcattaaagcgcgggggaggtcgatcggttcatcgtggaaccctttcgctttggcggtttcaaatgcgcgtcgccccaattctttgagtgttaaatttcccatgattatttcatttttgaaaggtttttactcacataatccgtaaaagctcatgcaactggtcgctgtgtcgtcatcgaacaggctgccggtcgcgttctgccatttgacatattgtactacctcgtttattgtcggatatttctcgccgctggtaatcgcgtgggcggggattttatccggtccaaaaaacgatgacttcaggtcatgctccagcgtggcaatctgctcgatgcgatccggagattggcgggaaatgttcagtatatctcgctggctcgccatgacgcacggccagcaccctacacgcttatagcccatcgtgtagagcggattgggttcaagccccgccgagaggatgtagtcgatcacctgctgcgccgaccaatcaaatacgggacgcagtaggtcgtcagcgtattgctttcggaacacccgcacgtcgcgaccgcgataggtgtgttgcttcggatttccggccttatcgtatccgtatggctcgaaatagtacttaaagtacgtgcattgctttgacatagccgcacggttcggagattccgccgcgcgtatgccttggatcatcagcatattatcctgcacgttgtcgagcacatagtcgatgcacggcttggttttcaactcttgggtacagaatcgggcacgggtggacggccaacgctttttctgcttggccaaaccgaccatcccatcatacttgggcgacttgagcgttacgaggtcgaggtttagccggtcggcgatgcgattgatgtactcgtaggtcagtggatgctcccatcccgtatcgcaaaacacggtggtaaagttggtggtgatgtgctcgcgcacccacaacagcgccgcaaggctatcctttcctccggaaaatgttacgattattttcatctaccaaagtgttttatacagttacagatcgtgattgtcggattggcccattgccgttgaaaccggcgccaatcggttgaatatttaccctcaagatcacgaaacaacattgccatcggcataaaaccggctcgccacgcctcgcccatccgtgtctgtgctttctcgaacgtgtctcccttgtaaccgcacaacacataacacctcatcgagttgctggatttggtgaaacctgcctcgataagcattttgcctgcctcaacgagcgggtccaggtcgttgggggtgtcgtaggcgaaaaatagcgattggggatgtaactcatgtattcgttgcgccatcgtcggggtcagcaacgctgcctccagtcctccggtaaattgcggcttgtgcggctggcgggcaagcatggcaaatacctcgtcgatatggcccggagagcaggccagcaggttgtcatcggtcagaatccagccgtcggtaactggcaactctcggagcattccgccctcacgcttgggaacagcgcaaaaccagcatcgattcggacatcctcggctggtaatcacgtatccgtgcctcatgtacataccagggataaaatcgccgcccggctcattgtaagcgggaccgccgatcttcaccgttgcaaccggctcccattgtttcgccagccattcagcgatcggtatgtcccaggtgaacgttacagaaacgtgtacctcgtccgctttgtcgaaaaaggacggagtttcgcggatacgtaccagctcgtcggttggcgtagcattcgtcttggttgggaatactcgtattatccgttttttcatatccatttcagaataatttttgctgcatttggtgatcgatcaatcttcaataacccgcacgtaggtatcgtttatagttcgacctatctctatcaacctcaacgcgaccatttcctccaatacggcacgaaaagcggtgagggattgggaaaaccgcgttttcagcataagtccgtcgcgtatgaccagagcgtcggcgggcatcctgtttgtagcccggcgggtgcgttgtacctcgcggacgtggcgccgtatctcggcgtgcaaagggttggctggttccatttattgcccgcttaatttttcaacgatccgcatctctcgttcggataacttacatactatagcctcttttttcaccgcagctctttcggcggcaactctttcggcggcggtatgcgagattaaaaaaccggagccgtaaatcgttttcccgtgctttttttgagcatcgagtgcagagcggtgcagcatttcccgcttgtctatctttatctctcccttgtttttcacgatgtacgctacatccgaaaccgtcagcacgcagtccgggtatttgtatttcggcaactccgctttcggtgccgagcaaatggcgtcgatcccctcatatagcacaggatcacctattacaccggcttcgccgaacatattggacaaaaaagatgtatttacttttgccccgttttcgtaaacgatagcggcgccgcatacgatccgtgtacagtcaatgttagcgctgaacaatgtcagatgcggggcaaacaggaaaaacttgatccctcgtttcagatagaaccggataatttgagcgatgatcgaaaagggcgggttgtcgatcaccacgcaattatcgggatagaccaggctctcgtaatcaccacccggatagaacgggcggacaacggtcattccgtcgatatcgcaatgatcggctacatattgcaaaacatagtcgtacaccgctgggggcgtatagcagtcgtcggtcgttttcttgggcttgaatttttccacaaagccctcgtaatcgtcaaaaagccctttttgcgactttccgcgattcgtgaacacgtgctcctcttggccgaataaatttatacttttcatatcatgctgcattttcaaaatccaaaatcacgcgccccaatgcttcgcagagcacgcgggccattgtaacctcaacagcgttgccgatgaacttcttctgctcggcctgtgtaccgaccagtttgtagttggcggggaaacccatgatgcgtttcagttcgggaatcttcaacattcgcatcttcacatcgaccagcccgtacagtgccataaactcctttatctgcaccacgatcgggctgtctgttgcatagacctcgtaaatcagcgtatcgacatcgtggcggatgaacggcgcaagatgctgcacgtcggcctccgttgtaacgatactgggcggtcttttgtccatccgtgcgatcagcgtgaagcacgggcgatctatgggcgcccccgctgatgcgaattgcgggttgagtagataacgacctttacgggccggtgtctccgagcaacacgtaacgaggcggtgttttggcgtgggggttacagtcccggccggcaccttgacggacgcggtgcgtccatttccgtactgcatattcaggaatcgaggacgcaccagttggagccggtcttttgtcgtgacggtcggggccggcgcctcgacgggcgagttgtagccgttgccataatacgccgtcagaaaattgccggacaccagtgagtggtgatctaccgtcgtgatggcgtgcgccggcccgtcgatgctgatggcacggtcggccggcgatccgctgaagtgcttggcaaggaaacacgcctttgccacgccgagcctgctctgcaccgcaaccgtcgggcatggatcgtcgatgcctggtgcgacgtatttgccgctttggctcatggagttgtatttgaccatgaacgcctctttgccaccggcgacgaacttcaccagcccggcgtgtatgcgctcgaaggttgcatccaccagcggctttttgcggccgaatatgctggcgccctcgtcgtgcaagtccagcacgtcacgaaccgggcgccacttagcgcgggcgtcgaacaagttgggggcgggcttcttggtatgggtgggcgtcgggaaaacgatgggcagccggccggcggcgaaaatcccgaagaaccggcgccgggaggtgtaggccccgaagtccgccgaatcgaggatgcggtggtcgaaccgatagcctccgtccgcgcaaatgcgatccacccaccggcggtaatgctcgccgcgatgggcggcatcgggcacccacacgggggcgatggtgcggcgcttgtgtttgccggtgccctcggtctttatcgccagtggacagtattcgccatgaccggccgatgcctcgacgactttcaccacgagcggcccccacgtcatgaactccttgacgttctcgatttggatgtagtcgggccgcagtgcgtcgatgtatcggaaaaggtgctcggcaagcgtgcggctgtcggcgtcgcggctttggccgcccttagcgatcgagaagttggtgcactccagcgacgcccacaacaccacgcgggcggcagggtattgtttccgcatggcttcgacatgggccagcatccggtcgaggttcaacgtgcggatgtcttcgacaaagtgcagcgcgtcgggatggttggccgcgtgcgaagcgatcgcgttggcatcgtgattgacgcacgcgatcaccttggcgacctgctcgccgtgcaaccgtgccgcctcaacgcctatagatgttccaccggcgccgcaaaagaggtctatgtacagaaagcggatcatagcgtaatgttttcaaacatccccagctctttgctgcggcgtcggttctcgatctcgatgtactcggggttcaattcgaacccaatggcattgcggccgagtttgttggcgacgatacgcgtagtgccggagccgttgaatgggtcgagcacgaggccgccagcgggacacccggcaaggatgcacggcacgatcaaatcctcggggaacgtggcaaaatgggcctctttgaacggctgcgggggaactgtccacacgcttcgtttgttgcgcgtcattgaagcttccggcgctatctcggtgtattcaatcgcttccgcacgaccggagcgatggaatgatccgtgccctcctttacccgtgtcccatcctgccggcttgcgctgccggttcttgccgacgttcgggcggttgatcaggtttttgccatcctcgaatttcgattcgttccacccggtcgccggctccttgatcgcctcggcgtcgaagtagtacttggccgatttgctgaacaggaaaatatactcgtgtgctttcgtacatcggtctgtgacgctctcgggcatcgggttcggcttgtgccaaataatgtcctgacgcaagtaccagccgtcagtacggagggcgaacgccagcaaccacgggatcccgatcagatctttatttttcagatttttgcactccaacccgaatccggattttcgaactggctgacctcgatgtccggcgtaatccgtttgtgcgttttttcgtacagcattgcccttgtaggagttgtagctatcgcccatattcacccacaacgtcccctctggcttgagcgcacgccgcagttcgcggaataccgtcacaagttgatcgatgaaaacctccggcgtttcttccagcccgatctgaccatccacgccgtagtcgcgcagaccgtagtagggcggagaggtgacgatgcagtccacgcaatcgtccggcagtagtcgggccgctgcaagtgcatccatgttgtaggtggtattgatttgcataactttcgttttatcggtttgaagtcagccgagccaccagcgcggcgcattcgtcttttgtgcggggcaactcgatcgtggtggtgcggccaaggtcggcaaacaggcgcttcagcatcttgatgcggagcttgccctgctgggtggccacgcccttggtgtcgatcgccaagtcgtaatccggcaggtagaagtccagcgtgtaggtgatcgcccgaacgttctccccgttgtaggtgaacggctcttgcagggtgtagcgcttttgaaacagaaagcctattccgtgcgatttcagcagatcgtgcatgtagcgttcgagtcggctgtcgaagatcaccccgttttcctctgttttcgtcgcgtttaagacctttcgattgccgatcggtgtagttgtgctatttcggggaagatcgccggaaataagccgtctaaattcgcttacggtcatcgtgtcggtgttgtcggtcgatcttcgtctcatgcttgtattgcggctatgtcgattttacgcatccagtacttcgtgccgtcgggcattgcgaggaactggaaatcgtcccacgccccccggcctccgtccacctcggcgatcacctcgttgtacgtgtatttgcggcccgtgtcggctttgcggctcttgatgatgatgtcgtgagccacgaacgaggcaaacgtcgagtatgcggatttgttcctgtacgcccctttgttgtccattgccgcgatgatgcggtttatatcctcggcactgaacttggccagaatgtcgcgggcctgctcctcggtgatcggttcggccatcgctgcgatttcgggataggccgaatcgagccagtcgaggaactcggcggtttggttttcccccacaccccctttccatgtagggattactgtgtgtgtattactcttactgttactcttactcttaaaaaaaggaaattcgccgataattgacgaaaaaccctgtttccgcctgttttcggcgtcgaaaactcccgccggctctgttttttcaacattttcagcgtcgaaaatcatttcatttttggggtttcgctcctttttcgttgtgttttcgcttgttttcggctcattttcggcgtcgataatttccgcgccccctgcgtctgttttgctttttgccttattatcaaggaaaagcaaatcgcgctcgcgctttaatagcaaaggtttcaggccgttacggtgttcggcggagaaaataaacccatccccgatttccaacaggccgattttgacagcatattctactatcgctatcagatcctccggttcaacgtcgtaatcggccgccagcaactcgacggtcacatcgtcccacttgatgcggaacaaatcgctactggtcagcgtttcctgcaaataagtccataccgcataccccaagtgtgaaaacttgcgccgaatggcctttaccatcggtttgtttcgttcgtttacgtcgtgcgggaaccagtccgcatttagttttctcggtcttgccataatttcccaaccttaaattttcttactcatttagttttcggaatccaattcccacagtaatcggagcagtgacgagcttcgaaatagctttcggggacatcgtggtgttcgcattcaccatacccgttggcgtcttcatacttgaagcaattgcacgatccgcacaccttggttccgttctccgtcaccctgttgtattccgtatcgatgtcggcggagtacccggggcatgtgtcaggcttattcataattatatcgtgtttttatggttaaaatgggaaatctcgttcctcctccgtccggcgctccctgcacgtgcttttgagcctggcggacaaatagagcgggtcatatagacatccgatccgcttggcgacccacagcggtacccgcccgtcgccgatgtacgccgccatgatcgcgtcgcacagctcgcattcgtcgtgcttgatgcaccgatcgcaattctcggcgtcccaagccgccaactcgctgcggctgccgaacgtccttacgggcgtgtctttttcaaaggggtggttgttccattccataatcggggatattagtttgccaaatacagccgtacacggccatcgatgtaaaactggatccgcagccccagcgcctccaatacatccgcataattctcacggatatagtgggctgcccgagggtctgaaacataatcgcgataacggatcacgacacggcgcaaatctcgcacattgtcggtattaacaatatcattgaacgaggagtcgcaatacttgtaaaatcggcgatgtacctctttcgccgcgtccttcatttgctcgaaagtctgttccatttcatacggttttttgtaggttcttttttccgcccatccactcgaacggatcgggcatacagtccagttttgcgcgatcatctgccgatgacttttcacgacgatgcaacccttgccgatatatcatcatctctatgctgcgaaccgatcgtccgtactcctcggcgattgcctgcacatcctcgccggacaaatagcgggcgattacgtcctgcacctcgaatttgtcccatcgtctgtacatctttcccatcgctgcggattattcgtgattgtcgaaccagctggcgcggttgctttgcgaggcgaccagctctatgcgttccgccagcacacggcacttactgttgcgggttccgtctttgattatctcgatcagcccctcggcagcccaccgatcgaccgtaccacggccgaatttccggtagcattgtgtgagggtgtagtatttcgtatcgtcggccagctccgcccgagccatacgatacccggcagcgtaggcggcggctatctgctgcaaatgcagtcggtcgagaggttcgtggttcatggtattacgatttacgggttactttgataacgccggttcccctcaacgcggataccgacaatttgatgtttttacccttgcagtagcggctggcgttggcccgcacgctcgattcggtaaactcggcaacgctgaactcgacgctttcgccaagcctcaacgcggcaaaggtttcggtaaagtttacggttcggactaattcggccataattgaaaaactgtttgtgttttgttcccgcgccggtatcgctccgggcaatcgcttgacggttcgcgggattgtgctatctatttgatcaattcggggttatcgtggatgttgccaatgacttcttttccaaacttataaatccaatcctgatccaatcttaaataacataattcttttctatcgaccaaggcccccataaaagctgcgttgccggtatggtaaaagattctatgagggcgagttttatcctcggacaatggagagcgtatcacatccccctcgtaaatctccttgccgttcttgtctttcagccccgtgtactcgccgacggtggcaggatcgacccggacccagtattccacttcttcgctccaaatgagggttgccttgttgcgcgtatcgaaccacaaggaaccgaatacccatttcctttctgcgatacctatacctctgtacctaatctctctcataatctcgtttatttgattcgtataacagtaattcggtcggctgccacctcgactttgaatcctcgccccgtgtcggcctttaccgatacggccgtgttccgaatggtagatggtttgtaatcctcattccgggggaaaatgaatttggacccaatctcctccagcgacctaatcgtgccgcggatgtttattcgttcggtcgtttccattttatttgtatatttgtctttgtgtatatgtttacgatgcaaaactaaagtaaaaacttgataaatgcaaaaaaagtttgattattttgatgtaaataaacgcatcatacagataatgaaagagaaagggtataataaaaactctcttgctaaagctatggggatggcgcagcctaccataaagcagattgaaaacaatgaaaatttgccatctctcaagtttttatttgagtttaaggacgttttccccgatataaatttcaattggattttaacagggaaaggaaataaaattgatttagtaggggaatacgatataaaacacgagggggttatagaatatgacatggatgctggcgggtattctatgcgataccatgatggagctaatgatcggacagtaaccgacaaaaattcggaacgaatcgataaattattggatattgtcgcctcccagcaaaagacgatcgaattattagcccaaaaaggggctgcgggggatgtgccgggtgttgctggcaaggcggtacaaggataaaacaacccgaacgatttatgctgacacccgattatccgatcaaagacgcagcccaaccttacaacctcaacatcaccactacgacaaaacggattacaaaactggatatattattgtttcacgcattttcagaataaaacaataaaaatatggatttcaaagaccaaatcaagcaattaagcgagcgcgtagtcaaactcaaagacaacatccaaacagaagaggccactaaaacggctttcattatgccgatgatccaggcattgggttatgatgtattcgatcctaccgaagttgtacccgagttcacttgtgatttgggcatcaaaaaaggcgaaaaaatcgactacgcgatccacaaagacggtcagcctatcgtactgatcgaatgtaagcattggaaagaggatctgaactcgcataacggacagcttttccgctacttccacgtttcgaacgctcgtttcggcatactgaccaacggcatcgtctatcgcttctacaccgatttggtcgagaagaacaggatggatgaaaaaccgttcttcgagttcaatatggagaaataccgcgaatcgcaggtggaaaagctgcgggagttccataaaagctatttcgacgtcgaaacgatcctcaacacggccagcgaactgaaatatacaaacgaaatacgcaacgccatcgtcaaggaggtgaacgatccgagcgacgaattcgtcaagtatttcgcgcgtccggtctatccgggccgtttcaacgacatcactttggaacaattccgagctatcgttaaacaggcttttgctcaatatgcaaatgactatatgaacgaacgtctcaagtcggctatcggtgccgatacggtagtagaaacccgagccgaacccaaatccgagcctgcatcaccagtggcagcgccctctgaagaaccggtgtgcgaatgtgaaaacaaggtcattacgacggaagaagagatacaaggtttctatatcgttcgtgccattctttatccggaaatcgacgacatttcccgcgtggtacaccgtgacacgcaatcctatttcggaatcctgctcgacgacaacaaccgcaagccgatatgccgcctgcatttcaacacaagcaacaaatacctcgaaactttcgatgcagagaagaacggcacgaaacatctgctcgaatcactcgacgacatctacaaataccgcacggaaatagtcgctgcctgcaagatgtattaaacaaatttctgccagattaaaaaagccccggatcgctccggggtgtcgttttccctctatctttgccgcataacctcaactgaataacaacgtaagaatggaattacaacctatccaaagtaagatttacgagatacggggccagcgggtgatgctggacttcgacttggctgaactctacggcgtaactaccggcaacctcaataaagccgtaaaacggaatatcgaacgattcccggagcgctttatgtttcaattgacccaatcggaggctttaagattccaaaatggaaccttaaacgaaactacaggtaaaaccaagcgaggccaacatttcaaatatatgccttatgcctttaccgaacaaggcgtatctatgttgtcggcagtattgcgtagtcctaccgccgtgcaggtcagcatatcgattatggacgcattcgtggcgatgcggaactacatcaccacgacgacgcagataacggcggaactgtccgaaatacgggcaaagctggcattgttggaacgtgctgacgaagacaatgccgaagcggtaaacgatctctcggaggatatgcgtaaagaacttgacaacatttatcaggctatcgcggcgctgtcgatcaaggtgccgcaggcccgcaagtcgccccagccgatcggcttcaagcgcacggaatcggacggaaacaagtaaagatttcgagattattgtaaattcttcaaatactttcatattttaacaaaaaatccccggagtgatccggggtgtcgtttttcctctatctttgtcgatgttgtcctttcgacctcaacatgaatatcaaatatacatatgacgcagaaacaagccatacaattatttgaagagcgcaaggtgcgcaccgtatgggatgaccaaacggaggagtggtatttttcgatcgtggatgtcgtcggtgtattgaccgacagcgtgaatcctacggactatatcaaaaagatgaagaagcgcgacccggagctatccaaagggtggggacaaattgtcacccccctttccgtgcagactgctggaggtcgccaacgggtgaactgcgccacgacgcaggggatgttccggatcattcagtcaatcccctctccgaaagcggagccgttcaaacagtggatggcgcaggtggctgccgaccgtctcgatcagatgcaggatccggaactgtcgattcagcaagcaatggtcgattacaagcgattggggtattcggataattggatcaaccagcgtctgaaagcgatcgaggttcgcaaagacctgaccgatgcgtggaaaaagcgaggggtgcaggagggccagcaatttgccacactgactgacataatcacgaatgtgtggtctggcttcaccacccgtgaatacaaggcatataaagggttgcggaaagaaaatttgcgggataatatgaccaacacagaactcattctcaacatgcttgcggaggcttcgacaaaggacataaccgaagcaaccgacccccggacgcttgcagcacacaaagcggtcgcgcgacaaggcggcacaattgcccgcaatgcccggctggaactcgaagcaagaaccggccgcaaggtggtttctccgttgaatgcacatcaggtattacaaatcgagaagacggacgaggcggaattgcaggccgaagatgaagagtaaaaaagcccccggagtgatccgggggctgccgtttccaaataggtcgtcgtcaaacaataactaccggcaacagcaattcatcacaacacaatcgaatagaacggcgccgcgaatttgtgcaacgcctcgataatcttacgacgttgtgccgggcgtggtttacttttatcattggcataacgtcccaactgggcggccggaatgccggtcaattccgccaatttggtatccttgatatactctcgtgcatatttcaatgcgctaaccgcgtcatactccagttcgatctcatacgctccgtccaaatatgccttgtagggaaaacccatctctttggccgttttgatatagagtgcaacgccctctttcatgtcggcaacagccgccttgacggtatcgcccattccggcaaacatatctttttccatcatggccgaaatcgttccgtccgatgcccattcgatgataacctttaccttttccataagtcgtgtgtatttatttcgtttccggttgcccggggagggggcttatttcagccccatctcccggataaaccgccgtgctattcctgaacccatttctttcgaaccgtgaaaaggaaccgaaaccgttttgccatccttttcataaattatgtggctccctgcctgtcggatagatcgccatccgttttttaggattaggcggtgcaactcacttgatttcatattaccctttgttattgtttgacagtacaaagataatgcaaaatatagcattatccaaataaatagtatattattttatacttttatagatgataattagtatttacttttcacgtagtccaaaacaatgcggttgttcgtgtcgttgcgcgtgaaccggcggtgaatgtacccccgcgtggtcttaaggcttttgccgctttcgaagccagaagccaccccaacgtgattaagcgccaacgcaatgtcagtttccgaaatcccgcactcctcggaggcaagagtagcccaggtgtggcgcatataataggtgcttaaagacacatcgattcccaagtgcacggcgagctgtttgcagcccgcgtttacgttgtggttaaagtcccggaaattagcgtacattttataaaatgagaacaaccgccgtttgtcgggatctcggtacttttcaatcagcgacagcgcctccggttcgatcttcacggacatcaacgcctcgtccttacgacggttagccgtcttttgccggtggtaggtgatccgatcgtcttcgagttcgacatcggcaccgaacaagtcggcggtgttcatggccaacaagtagaacgagagcgccagcacgtcccgtgccagctgcatgcgcttacccggaacggcttcggctttcagtattttcacaagatcatccacggaaagatcgcgtttctccggctcctctttaacctcgacctgtaatttcttactcccgaacggccggtgggtgattagaaccgtttcggcgtcctcatcgttgtagtgatcgcaggctgcattaaataaggtgtggatgtcggccaaatagtcttttaccgtttgcgccttgcacccgaggcgctgcgtcgtaacctcttttccatgctgatttgttcgcatttgctcgtgcggtttctgcatatattcgacgaatccctgcaagttcttaacgttgatttccttgacgaatacggtggaacgcccgaaatagtcagttaagttgtgaatgacggcttcgaaccgtccggctgtcccatcccgtccctcggccttcaacgcctcaatatggttatcgcaaaaggcaatgaagtcaatgcccacgccgccctccgtcgccttttgtgattcgatatactttaccaggtcagctgcagaaaatcggctcaagtccgtgcccagtcctttggccagcatatcctcgtatttcgatatgtcatttaacaatcctttcaaaattgttgtatctttgatcccggaaaaatcgggctttacctgcttccgactgacatatacgccggtagatatttttcttacttcccttttatgggtaaggcggatggataccggaaatttaccgtcccgccgctcgttcttctctctgatctcgatagaaaatgtaggcatatgctttgaattttggacaaacaatggacaaacaaagctacatatttttaccgaaatatgtgtaaaagtgtgtaaaataagacgggtgtagaaggttgattttatggcaaatgcgctgtgtggcaggtttttggggaattttaccttgaaattatgtacttgcatggcatgcaagaggtcacgagttcgagcctcgtattctccaccaaacaagaaacagccgcatgatttcatgcggctgtttcttgtttgatagtatgtcttttatgggcggagttcggacgcttccgtcggaagttttcccggctgatcccgagggtcagtttttcaggtattctactgccgccagaccgtcgttgaggggatagaggccgatgctcagcgatttgtcttcgctttcatatacgtacattctttgtcccggacggtattcgaggtagatgtacagctgcgagaggtaggtgtgcaggtcgtcgatgtacaggtctgaaagtatcgatccgcaggaatatactttgtcgtcttcgaatatatatatgtactctttaacgatgcccttgccttcgaaatacagcgaggtttccgatgctccgctgtaggcgtagggcaccgaagctttcacttcctcccgtgtcttgccgtacatgaatacgggagcttcgtattccctcaaagtgggaggtatgttgtccttgttctcatcgtcgttgcatcccgcgaatcccagcattacggccgcgaaagcgaatagtaagaattttttcatagcgaaaagataaacggtttggaataaaggttttatcgattgtaaatgagataaattattctttatgggtgcgccgccggatccctgaatatggtgtcgaggatatccggtgatctctatttttgtcggaaatagatctggatcggtactcccgagaaatcccattcctcccgaatcttattctccaggaagcggcggtagggatccttgatatattggggcagattgacgaagcaggcgaactggggcgtgggtgtcggcagctgcatcacgtatttgattttgatgtatttgcctttggtcgccgggggcgggtagttctcgatgatcggcagcaggtagtcgttcagcgccgaggtggccacgcgccgcttgcggttttcgtaaacccggatggcggtctggagcacttcgaggatgcgctgtttgttgagtaccgaggtgaagatgatcggaatgtcgttgaagggcgccagtttttttgccagggcctccttccactccttcatcgtgttgttgcctttctccaccagatcccatttattgaccacgatcacgcagcctttgcggttgcggacgatcaggttatggatgttcaggtcctgggattcgaggccttgctgcgcatcgagcatcaggatgcagacgtcggactcctcgatggcgcggatcgaacgcatcacggagtagaattcgaggtcttcggtcaccttgccttttttgcgcatgccggccgtatcgaccaggtagaaatcgagtccgtacttgttgtagcgcgagtgaatggcgtcgcgcgtggtgccggcgatcggcgtgacgatgttgcgctcttcgcccagcagggcgttggtgagcgacgacttgcccacgttcggacggcctacgatggtgatgcggggcagctcttcctcctcgttcttggtttccgggggcaggtcgcgcacgatttcgtccatcaggtcgcccgtgccgctgccgctcatcgagctgatgcagtagggttctcccagtcccagcgaataaaattcgtgcgaggagtagatcaggtcgtagttatcgaccttgttgcagaccagcagcacttttttcgaagtgcgcctcaggatgtcggccatcatctgatcgagatccgtgatgcccgtattgacttcgaccaggaacaggatgacgtccgcctcttcgatggcgagcatcacctgacggcggatgtcgtcttcgaaaatgtcgtccgaattgaccgaatagccgccggtgtcgatcaccgaaaattcacgtccgttccagtcggttttaccgtaatggcggtcgcgtgtcgtgcctgccgtcgcatcgacgatggctttgcgctgcccgaccaggcggttgaacagtgtgcttttgcccacgttcgggcgtcctacgatcgctacaagactcataatgttattttacgtttatgtttatgcgaaacgaattatgcggtgcgggccgagagcgaggccgaatttattcggacatcgatggatgcggccggtctaaaacaaggtcaaagatagtgcaagttacgggtaaaaccaaacccggtgtcgattttacccgattgtcggtgcataaggggtgggggccggatgtgcacatcttatccttttccgatcgggagatgcggcttccgaaggttttccgaacagccgcgatgccttttcaacgggggtgcagcgtctcttcgtctgcggacaggccatgttccgacatccggcggatgtctccgttacagcggtaaaagggagcggttcgtacaggaggtatgcggcacgtattatgggttataaatagcggctttccggatcaccggcctgtacgggatagatcagcacgaaactgtttcgcccgaggtattgatccaggtaagccgggatcttgttcatcgccggttggtaggagatgcgttcgcggcggctcattaccagccacagacagtcgtccgtgcgcaattcgcgcagcagggccggcagtttttcccagtctttgaaaagtaccgtttctacggttgcggtctgcttgcgccgcagcggttcgatgtacttgagcgttgtttccggggcatagacgacgattttggtcccggtattgcgggccagatttccgattttatgcagccacatgagaaatccggcctctttttcggcttgggagggaatgattacgatatgtcgctttatggtcgccagcggttgtaccggtttgtaaatgtaggtcgtgacgttgctttcgcccagcaggtcgcccgtgatcttgccgaggaagatcgcgggggatttgtcccgatggagtcccattacgatgtccgtgatactctgttctttggcgacgcttgcgattgcgttcgagatattgacgtcgtagcgcagcaactcgtggaggtagatgtccgatgcggcagcggccgtcgccgccgtttcgagaattttgcgggcccgtttttccagcccgctgtcttccaccttgttgtctatggcgtgcagcgcgtagaatccgttgtggtttttcttcgatttgagcacgttgcccagagttacgagttccctgacgctctcttcgttcgacaccgggatcaggatgtgttcgtcctgatgttcggtgctttcgtcgttttcgcggacccctttgatggcgatgttgtgagcgccgcgctgggtggcgaaggtcgaaatggtgcaggtggccaggatcatcaggatcgtgccgttcaggacgctttcgcccagcagacggatcggttctccgtcgggtgtctggccgatgatgacgttgtagcccaccatcacggctgcgagcgtggcggctacgtgggcgctgctcaggccgaagatgaccgtcctttggtcgctggagagtttgaatgttttttgagtgagcagcgcggcgatgtatttggcggcggtgatcaggacgatcatcacggcggcgaccttgatgctctcccagtcgcggaagaaggcccggtagtcgatcagcatgcctacgccgatcaggaagaaggggatgaagatggcgttgccgacgaattcgatgcggttcatcaggggcgaggtgcgcgggatgaggcggttgagggccagccccgcgaggaaggcgccgatgatcggctccagtccggccagatgcgccaggtaggcgcccagaaagaccatgaccagcacgaaaatgtattgggagatgttgtcgctgcaatgcttgaagaaccagtgcccgatcagcgggaagagctgcatgatgaatgcgatgcagagcacgaccgagatgccgagccggtaccagaacatgtcgtccgtgtttccggtgaccatgcctactatgaccgtcagcagcagcagggccagcgtatcggtaatgaccgtgcctccgacggcgatcgtgacggccttgtcgcgggcgatgcccagtttgctgacgatggggtaggcgatcagggtctgcgaggcgaagagtccggccagcaggatcgaggagtagatcgaaaatcccaggatgtaatatcccgccagaataccgagcaggagcggaacacagaacgtatagagtccgaatacgaggcttcgggtgccgttcttgcggaaatccgacatgtccatatccaggccggagaggaacatgatgtagagcagtccggccgtaccggagaggatgatgctgctgtcgcgtaacaccaggttgaggccgtgcggtccgatcaccgcaccggcgatgataagtcccagcaggtagggaatcttcagcttgttgagcagcaggggagcggcgaggatgatgaccagaatcagcaggaatttgagaatcggatcctcgagcgggagggttatgccgtcgaatagaagcatcatgcggaatcggaattagggttaactgatcgggaccgtctgcgaaccgggacatattcgtgttcgccggaacggggccggtcgagtaaattttatcaatatgtttgccggaaaaataccgtaaagcacggatcgtttgccggaacctgaatgaacggttgtttcaatgcgaacagatcgcgcccgaatcggaacgacattcgttttgtcggggcactgcctgcatggtaattttacggaaacaaagatagtgaaagccgagagaaaacgggaacttgttcacggttttccgaggcgcatcctatctaagactatgtcaaagatagcaaaaaatggggaatagcaatgctttttttgccgaaaaacagggattccggataaaaaaatgcacggttttctctgtgtattccgagaaaaaaacttaactttgaccaaataatgaatgttgaaggacgtgctatgacggaaaggagagtggacaaacgattgctggcacctgtgctgatggggttctttatcatgggcttctgcgatatcgtggctccggtgaccaacatcatcagcggtgaatttgccgagagccagcagagtgccgtgagttttctgccgtcgatggttttcctttggttcctgcttctttccacgcctgtcgcggcgctgatgaaccgcatcggccgcaagagaacggcaatgatcggttatgcctttaccatcgccgggttgctcgtgccctatgctgcgggcgtcggcagtgccttgagttggtatttcatcggcttcggtctgctgggcatcggcaataccgctatacaggtggcggtcaatccgctgctggcgaccatcgtgcccgaggagcggatgaccagctacctgaccgtcggacagatcttccgcaatacggctctgttgctgctcgccccgatcatcacggggctggtttcgcttttcggcgactggcgtctgttgttgccgatttatgcggggcttacgctcgtcggggccgtctggttacaggtgactgcggtcgcagaaccggcgcaatcgtcccgtgcggtcggtatggccgagtgtttccgtctgttgcgtaaccgcgccgtgctgctctgtacgctgggcgtggcctgcttcatcgctgcggatgtcggtatcggcttcgtttcggtgcggttgatcgacaatcccgattcgattcttacgaccaccggattttacgctttgcgcatcgtgggtacgctcgtcggtgcctgggtgttgatccgtgtcgtcgatgtcaaatacctgcgctggaatatgctgctggcattggcgctttgcatcgcccttttcgcggtgcgctccgaagcggtcgtttatgcgttggttggcatcctcggcttcacgatggcctgcgttttcgccacgttttatgccgtggcgaccaagagtgctccgggccgttcgaacgaagtcgccggactgatgatcctggccatttccgccggcgccctttcgggcccgatctgcggcgcgctgatccgcggcttcggtcatccccaggcgggcttgatctgggtgacggcttgtgtctgctacctgctctgggccgctgccgtattgaaatccgataccaagaaatagagttatgaaaaactgtaaattcctgattatagcgttgttgttgagtattttgactctcccttcttcgggtcagtcccgcagatacgacgattatggacgcagcagccgcagcggatcggcgatcaagggagtggagtggggcgtactggccggactcaactttccccatttttcgacttccggtccggatttcggtatagataaccggctcggttggcaggccggactccagatcggcttgaaattccgctatttcaccatcggtcccgaggtgctttacgtgcggcagtcgatcaagttgagccatgccgactacggaactctgaaaatcaaaaccaattcgatcgatattcccctcatcttctcgcttcgggcgcttccgatgctgcggatcaacgtcggtcccgtctttacggtgatgaacgattgcaagtatgccgagggcaacaacgagatgttcttcggcagtatgcgcccgacggtttcctatatgttgggcctggggttgaatttcggacatacactgatcgacttccgttacaacgggcagttcgattcgaaaaagtgttattatcccaccgaagaggcggtcgggttcaacatgcgctcttactccctggcattgagcgtaggatttgttttttagcttatgatggattccgaagataagaagatcgacatcgagggggtggatccccgggagctgtacggcccccagaatatttacctcgaacagatgcaggagctgcatcccaacctcaaaatcatcgctcgcggatctgcgctcacggtgctcggcccccgaagcgattccgaacggtttcggaaacgactggacggattgatcgcttactacctcaaatacggctatatctccaaagagtcggtacaacaggctttttcgaccggggtgatcgaacacgacgctcccgtcgataaggacgtgatcgtctatggcaacaacggcacgatcgtccgggcccgcacggtcaatcagctcaagctggtgcagtcctacgaccgcaacgacctgctgctggccatcggccccgcaggttcgggcaagacctatacggccatcgccctggcggtgcgggctttgaaagaaaaacacgtcaagcggatcatcctgacgcgtccggccgtcgaagcgggcgagaagctgggtttcctgccgggcgacatgaaggagaagctcgatccctatctgcaacctctgtacgatgcgctcaacgatatgattccgcccgccaagctgcaaaaatacatcgaggaggggaccgtgcagatcgcgccgctggcctacatgcgcggccgtacgctcgacaacgctttcgtcattctggacgaggcgcagaatacgaccctgccgcagatcaagatgttccttacgcgcatgggacgtaatgccaaattcatcgtcacgggcgacgtgacgcagatcgacctgccccgtcgttccgacagcggattgacgcgggcgatggagattttgcgcggtgtcgaggggatcggcatcgtggagttcgaccgccgcgacatcgtgcggcatccgctcgtcaagcagatcgtcgaggctttcgaccgcagcgctgccgtcgaagcggcacctgctccggaaactggaaaatagaaacgataaccaattaaaatagaactactatggataagaatttgaccgctttgaaacccgcgttggtttggaagcattttgcagaaatcgccaaaataccccgtccttcctcccacgaggagaagatccgtgcgtacgtgatcggcgtggccaagagtctcggcctggagtgcaaggaggatgcggcccacaatgtctatgtccgcaagcctgcctccaaagggatggagaaccgcaaaggtatcgttctgcaggcgcatctggatatggttcctcagaagaacaacgataagaagttcgactttaccaaggacccgatcgaggcgtatatcgacggcgaatgggtgacggccaacggtacgacgctcggtgcggacaacggtatcggtgcggcggctattcttgccgtcctggaggacgatacgctcgaacacggtcctctcgaagcgcttttcacagcgaccgaggagacgggtatggacggtgcgttcggcctgaagaaaggggtgctgcacggtgacatcctgcttaacctcgattccgaggaggagggcgagttgtatgtaggctgcgccggcggcgtggatgccaacatcacgttcaagtataaggcggagccgactccggcacggaattaccgggccgtgaagctggttgtcaaaggtcttaagggtgggcactccggtatccagattgtcgaacagcgtgccaatgccaacaaattgctgttccgtttcatccgtgagcagaagaagtcgatggacatcctgctttgctcggtggacggcggcggtctgcgcaatgcgattccgcgcgaggcgaccgctacgctgatggtccgcaccaaggatctcgagcagctgaccaaagagctgaaagcgtatgaaaaggtcgtgaaggccgagttcgccgggatcgaggacgctgtttccatcaaactgaccgaaaccgaagcccctgaaacgatgatcgccaaggaggtggcggagaatctgatccgtgcggtcgtaggctgcccgaacggggtgcagaagatgtcggtgtcgatgcccggactggtgcagacgtcgagcaacctggcccgcgtggtatccgacggcaagacggtgaagttgcagtgtctgctccgcagttcggtgaactccgagaaggaggagctgggcgaggcgatctccgccgtgttcgagctggccggcgctaaggtggaactcacgggtgcctacaacggttggaaacccaatctggattcgccgattctggctgcgatgaaggcttcctacaaagcgcttttcggcaaggaacctgcggttacggccattcacgccggtctggagtgcggcatcatcggtacgaattaccctaagcttgatatgatttctttcggcccgaccatttgctatccccactctccggacgaaaaggtgaacatcgcttccgtcggcaagttctatgaattcctggtcgatacgctgaagaacgctcccctaaaataagtcgttttggaggagatgtccttgcccggcggtggtcggcgttggttcgtcattgtcaatcccgtggccggaggtggccgcgggcttgaccattttcccctgatctccaagctcctgcgggatgccggaatccagaccgaaccggtcttcaccgaacataagttccatgcgacggaactgaccgtgtcggccgtgaagcagggattccgccgcattatcgccgtagggggcgacggtacgctgcacgaagtcgtgaacggtctttttattcagcagacggtcgatccccgcgaggtgctgctggccgttgtcgccgtgggagcggggaacgactggatccgcacgttcggcgtgccgaatcgctatcaggatgcgatccgcgctatcaaggagggacattcgtttttacaggatgtcggagtcgtttcttacgaagaggctcactaccgtcagcaccgttatatggctaatgtggccggtatggggttcgatgcgatggtagtcaagaaatacgcccatctcaagaagaaaggacacagcaacaagtggctctatacgtggtgcatgatccgttcgttcttcagctacaaatcgacgggcgtgaaggtttggatcgacgaccggctggtttacaacaacctgttgatgagcatcgccatcggtgtctgcaaatacaacggcggcggtatgcagcagttgcccgaggcggtggccgacgacggactgctggacgtgtcgctgatccgtcccgtccatttctggcatatcctgttccgcttccgttatctgttcaacggcgggatttaccggattcggcatatcctgcaggagaggggcagccgtatccgcatcgaatcttcgccggagatcagcgtcgaggtcgatggcgaattgttgggggagtctccgttggagttttccgtattgcaccgagctgttcggatcgtggtttcggaggagttcctcaagcgggagagctatccgttgtgttcgtgcaatatcgtctgatttgatcgtattatgcgacgaaggccggaatccacatggatttccggccttcgtcgcatattccatcgccgttgcaacggggacggtttgcacccgcagcgggcggcgttgctgcgcactcttgctgaaattgccgcctcctgtggcgctgcggaactctttctcggaatgcgaaagggtgagtatggttttttatcggcgcatcggttgcgtacctgacaagattgtaatcggttaccctcttgctccgcgcttgtcgtcttgtcgaaacccggctgtttttaccgttttataatttataccggagctgttgttcggtctttagtcccgggtcctgtgccgggcttgtctgttcggaatcaacgaacaaagtcttcgtcaaacgcaagttatcgggagattttcgtatctttgacttcgtctaaaatacttcgcctgggcaaaatgcaaataaatttgcttttgcacgcggcttattcgtatctttgcatttccgaacgacggtatatcgaccgtcttcgcgggggcacctgcattttgccgatgcctgtcgaacggataatattaaaaacgaaagatattcaatggctttacaatgcggtatcgtggggctgcccaacgtgggtaaatcgacccttttcaactgcctgtccaacgccaaggcgcaggcggcgaattttcctttctgtacgatcgagcccaacgtgggcgtcatcaccgttcccgacgagcggctcattcggctcgcggagatcgacaatcccaagcgggtggtgcccaccaccatcgagatcgtcgatatcgccggactggtgaaaggtgcctcgaaaggcgaggggctgggcaacaagtttctggccaacatccgcaacacgaacgccattattcatgtgctccgttgtttcgagaacgataacattacccatgtcgatggttcgatcgaccctgtgcgcgacaagggtatcatcgataccgagttgcagctcaaggacctcgaaaccatcgagaaccgccttgccaagacccagaagcaggctgtcgtgggcggggacaagcaggccaaacgtgccgtggagatcctgttgcagtacaaggccgtcctggagcagggtttgagcgcccggaccgtggagctcgagaaagaggaccgcaagctggtcgccgacctgaacctgctgaccgacaaaccggtgctctacgtctgcaacgttgatgagaagagcgccgtgacgggcaacgaacatacccgggccgtcgaggccgccattgccgacgagcgggccgagatgctgatcgtcgccgcagctaccgaggccgacatcgccgagctggacgagtacgaggagcgccagatgttcctcgaagagatcggcctgaaggagtcgggcgtggcgcgtctgattaaagcggcctataaattgctggatttgcagacgttcttcacgaccggtgccgacgagagccgtgcctggactttccgccggggcatgaaagcgccccagaccgccggcatcatccacaccgatttcgagcggggcttcatccgtgccgaagtcatcaagtacgacgactatgtggcgctgggttccgaaaaggcctgccgcgaccagggcaagatcggggttgagggtaaggagtacgtggtgcaggacggcgacatcatgcacttcctgttcaacgtgtagtgccgcgctgccgtttacggtagcgggcggggcgccgccggatgcggtgatcgtgtcctgttgaaaacgccggaccggaagcggccgatgaattgcggcgggttagcaaatataattcttaaaatattacggttatgaaagcgtattggaagtacctcatcatcggtgcggcgatcgtcgtcagtgcctggttgctcgcaagggcgtacacatataaataccacgcgcaggagacgatcgtggtgacgggcctcggcgaaaccgagttctcgtccgacctgatcgtctggaacggtttcatcaccgccgaggcgcagaacgtcgaagcgggatacgcgcagatcgaatccagcaagaagaaggtgtacgactacctcctctcgaaagggatcgctgctgaagccgtggtcttccagttcgtgaacgtcaccaagcagtacgagccggtctattcggccaatggcagttgggccggacagcggtttaccggttaccggctttcgcagggcttcaccgtcgagtcgaagagtgtcgatgccgtcgagaatgtttcgcgtgaaatctcttcgctgatcgcccagggcgtttcgatcgaggctatgcagcccgattattactatacgaagctcgacgacgtgaagttgtcgctcatcgagaaagcatcggccgatgcccgtgtccgtgccgagaagatcgcggtcaatgccggagcgaagctcggcggagtggcttcggcccgtatgggcgtgttccagatcacgggtgccaataccaacgaggagttctcggccggaggatcgttcaacacctcgagccggcagaaaaaagcccgtatcaccatgcgggtcgaataccgcattaagtaaacggtatgggaaatcgtgcaaaaatcgcccgggcgcttacctcccgatggacggaacggatatttttcgtcctgcttctcgcagcggtcgctttgaggaacgatgcggtctggcgcgtggtatcgggtgccttcgtagtgtgggtgatgtgtgcgctgtgggccgtggcgccgactttgtgcaaacctgcccgagggggtgcagcggcgcaggatgcggccggtcgcaagacggccgaatccgaacatgacgataaaaaggaaatcaacaaagagtaacgaaatatggaaagacctgtccgggtgcgcttcgcacccagccctacggggcctctgcatatcggcggcgtacgtacggcgctttataactacctgttcgcgcgtcggcacggcggtacgatgattcttcgtatcgaagataccgactcgcagcgtttcgtgccgggtgccgaggagtatatcctcgagtcgctcaagtggtgcggcatcgagatcgacgagggtgtcggcgtcggcggccctcatgcgccgtaccgccagagcgagcggcgcgacatctacctgaaatacgcgaaacagctcgtggagtccggatgggcctactacgcttttgatactgccgaggagttggacgccctgcgcaaggagtacgaggcgcgcggcgaaactttcgcatacaactattcgatccgcgagaaactgcctacgtcgctctctctctcgaaagaggaggtcgcagcccgcatcgcgcggggcgaccagtgggtcattcgcttcaagatgcccgaaaacgagatcgtcgaaatggacgacctgatccgggggcatgtcgaggtgaacacttcgacgctcgacgacaaggtgctctataagtcggccgatgcgctgcctacgtaccatctggcgaatatcgtggacgaccgtctgatggaggtgtcgcacgtgatccgtggcgaggagtggctgccgtcgttgccgctgcattatctgctgtaccgggcctttggttggacggacctgcagccccgcttcgcgcatctgcctctgctgctgaaacctacgggcggtggcaaactctcgaagcgcgacggcgacaagatggggttccccgtgttcccgctcttctggaaatccccgacgggcgaaaccgcacgcggttaccgcgaggacggttatttccccgaggcgtttatcaacatgctggcgttgctggggtggaatcccggcaccgagcaggagatcttctcgatgcaggagctgatcgacaacttctcgctggagcgcgtttcgaaatcgggcgcccgcttccagcccgacaaggccaagtggttcaacgcccagtatatgcaccataagagcgacgcggaactggccgcactgtatcagccgatcctgcgcgagcacggcatcgaggtttcggacgagttggccgggcgtgccgcaggcattatgaaagagcgggccacgttcatcaccgatctgtgggatctgacctcgttcttcttcgtcgctccgactcagtacgatgagaagcaggctaagaagtattggaagggcgataatccggctatgctgcgcgaactgcgcgaggtgctggccggcatcgacgatttttcgctcgaaaataccgagcggatcgtgcacggctggatcgagcagaagggctattcgctgggacaggtgatgaacacgctgcgcctggcgctggtcggagccggcaagggtcccggtatgtacgacgttacctctttcatcgggaaggaggagaccctgcgtcgtatcgacaacctgctgcgtaatctgaagccgggcgaatagggatggagatcgaacagcagatctggggcgccacttcggagggcgaggccgttgtgctctatacgctgcgcaatgccgcaggtgccgaagtgcggctttgcaatgtcggcgcggctgtcgtgtcgattctggttcccgatcgtgacggacatttggcggatgtggcgctgggttacaaggatttccgcagttatttcggcgatccggccctgtgcggcaaaagcatcggccgcgtggccggttgcatcgcttacgggacgatgcggattgacggcgaagaataccgcttggatataaacggcatggccgggcatctcaacggcggtgtgaagggcttcgccgggcgcttgtgggagagccgtgtcgaaaccaaccgggtcgtgatgtcgctctcttccgacgacggcgatcaggggtatcccggtaatttgcaggtcgaggccgctttcgatttcgacgaagataatgcgctggaaataacttatatcgctcgaaccgaccggacgacgcccgtgaacatggcctgcaacctgctgctcaatctgggcggcgagggcagcgggtcggtactcgaccacgagctgcggctcgatgcttcgactgttttggaagcggacgatcgtctgattcctaccgggaaactgctcggtgttgccggtacgcccgccgatttccgttcactgcgccgcttgggcgagggcgtcgattccgatttcgaccggatccggatgctgcgggggtacgaccacttcttccccgtggacggttggcggcagaatatcctgaccgaagtcggcgaattgcgcgatgcacgttcgggacgccgggtggagattctctcttcgcagcccggcgtgacgctctacaccggcaatcgcttgggcggcggatgccccgaaacgaagtcgggcggccgctaccgggattacgaaggggtcgccgtcgtctgtcaggggtatcccgatgcggtcaatcggccggaatttccttctccgctgcttgcgcctgacggattttattgccagaagaccgtctatcggttcggtactttccggtaggtgatgactctccccaggcttgccctgtcccgaggaagataccggatttttcaactgtcggagccggaaaacggtcccgggttttgcctggttccgggttgtaaacgtttttttcggcaaatatccgaacagtcggtttttcgtcgctgtccgccgcattcggagtgagccgttcgaacaaagctgtgcgccattcctggggtcgagccgggtggcgtactctttttgtgatgcggtgcgattttccgaaatttaatgttatctttgcgcccgtattcttgaaggggtgccttactgtcaggctgagattatacccattgtaccggatacgggtaatgctgaaaccgggaatctataatcgatacgacataccccttttctgttcttttaattcaattaaagttatgaaaaggattttcttactgccgcttacggctgcggctgtctggtgcgcgatgccggtgcacgcggacgaaccggtggaaacggactccatgactccggattccatgaaactgtacgaattgcagcagatcgaggtgaccgctacccgcgtcgatcgcaaaactccggtggcatatgccgatatcggccgagaagcgatttctcgccggaatttcggcagcgacatgccgacgttgttgcaaatgactccgtcggtggtcgccacttcggatgccggcaacggcatcggcggtacggcgttccgtctgcgcggttcggatgcttcgcgcatcaatgtcacaaccaacggcgtgccgatgaacgatgccgagagccactcggtctattggtacgatacgcccgacatggcttcttcggtcggaacgatccaggtacagcgcggtgccggaacctcgaccaacggtacgggagccttcggcggttcggtgaatatgaccaccgccccgatgtcgagcgaattttctggcgaagcgtccctttcctatggctcctacaacaccaacaaacagtcgttgcagatcggttcgggactcatgggcggccattggaccgtcgatgcccggctttcgcatatctcctcggacggttatgtcgatcgggccttcaccaacctggagtcctacatgttgcaggtcgggtactacgatgggggtacggccgtgaagctgatctccttcggcggtgtggccagagtcggactggcttatgacggcgtgacgaaggagcagctcgaaaccgaccggcgctacaattcgcaggggcttgtcaaacatgccgacggatcgatttcgttttatgataaccagacggataactatacccagatcaacaatcagttgatcgtcaatcatcgcttcaacgcccgttggacgctgaatgtcacgggccactacacctacggttcgggttattacaaccagtataagaacggacagacgttgagtgagtacggtatcgcgccgatccctacggacgatccgaacgagccgattaccgaaagcaatctgattcgccgcaagtcgatggacaaccatttcggcggcgtggtggcatcggccaactatactcgtggtcgcgtacaactggccctgggcggtgcgggcaacgtatatgacggcggccactggggaaacgtgatgtcggtcgtcgatgcacccggcttcccgcgtcacgaatattatcgtaacgcctcgaccaagtacgatgccaacgtcttcgccaagatcaactgggaggctgcgcgggggctgaacctctatgccgacctgcagtaccgtttcatccggcataacattacgggcaccaacgacaatttcaacagcaccacttcggcgcttcaggagttggatattcaccgtacctatcactttttcaaccccaaagcgggcgtgaactacactttcgcccggaatcacaaggtctatgtgtcgttcgccgtggcgcagaaggagcctacgcgcagcaacttcaccgataccaagaacggggagtatcccacctcggagcggctgtacgactgggagttcggctatcttttccacaacgaccgtttcgaggcgggcgtgaacttctactatatgtcctacaaggatcagctggtcgctacgggcgaactctcggacacggggcaggagctgtcccgcaatattccagacagttaccgccggggcatcgaactctcggcttcgctgaacatcgcccgctggttttcgctgggagccaatgcgaccctgagccagaaccggatcgagaactatacggaatatgtttcggagtacgacgccgactggaactacctgggcgaaaaggagctgtatctcgggacctcgaccctttcctactctccgtcggtcatcgccggagtgctattggatttccatgtcaaagggttcagcgccctgctgcatacgcagtatgtcggcaaacaatactttaccaacggccgcaacgatgcgctgtcgctcgacgactactgtgtcaccaacctgaacctggggtatgaattggctgcctcgaagatcggaagcgtgcgtttcggcgtgcagatcaacaatcttttcaatacggagtattgtaacaacggctacggttattcgtcgattgtcggaggtgtgcgcgaagattcggccttctattttccccaggcgatgttcaacgtgctggccaacgtaacggtgcggttttaggcgatggaactcaaactcatcctgcagatcgtcggctttacgctggggctgctctatctgtggctcgaataccgggccaacatctacctctggctcgtggggctggtgatgcccgtcgtgcacggtacgctctacttccagacggggctttatgccgatttcggcatgaacgtctattattttctggcaagtgtctatgggtggctggtatggcgcaacgctcccaaaaccgaaaagggcggcggtatttcccgtacgcccgcacgccgctggccgatgatcgcggcggcgtatgcggcgatccatctgttcatctactgggtgctcgtgacctttaccaacagcaccgtgccgttctgggatagcctgaccacgtcgctgagcatcgtgggaatgtggatgctttcgcgcaagtatctggaacagtggtttgtatggtttgtagtcaatttggtgacggtcgggctctatttctacaaggagatcccgctcaccgcattgctctacacgatttacctgacgatgtcgctggccgggtatttccgctggcgtcggatgatgcggcggcagatgcggggctgattcgggaaagaggcgaaagccgggttactcttcggggagcccggctttttcgatctggtttcgtatttcctgccgcaaggctttgggggtgatgcctgccgcgacgagcagataggagtggcggagttgctcgcggataaaggcgtcgggcagatcaccatccgtacggatgccgttccagtggcgtttgttgctgtggaaagcgggagtgaccagttccggatagcgttcgcgaagcagaacggcccgatccggatcgcactttacagcgatccatcggaattccaccatatcggtgtaacagaacattttgcccccgattttgaagaccagggtcgtttcgtcgaacggggtacactcttctgccagcggcagggagaggcaatagcggcgcagttccagaatatccatttcaggatgatttttttagtgtgggtatatgcagcaaagcgggtgcggtgtccgttcgaaggtttttcgttcggttttgcatccgaagcaaagatatacatagtttttccgattcggaaaataatcgtcgagctgcatcggtgaatttttggcaatctgcggacaaaccgtttcccgcatccgatatttttcgtacctttggctctgataaaccgattttgttatggaggtgaacaagatacaggaagaacttgcccgtttgatcgaactggtcgatggctgggcgggttcgcacgatgtccccggcatcgagcgggatttggttttggacaagctcaaaaaattgtatgaagcgatacggtttgcgaatttcgacgaaggggattcctccgcttccgcgtccgtcgctgcgcagcagtccgtcgccgaagttgcgccggtgtccgaaataagtatcgacctggacgatttgctggcggagcctgtccgcgatttcctgccggagtcggctgcgatgcccgaagctttggatgcacccgtcggggagtctgctgctgtgccggaatctgcgccctccgtgaagccggtttcggcatctgccgttacagaacctgagccggaacctgtacttgtcgttgcgtctgctcctgtggccgagccggatccggtgcttgccgacgaatctgcccctgaatccgtgcctgtatcggaatctgcacctgcagcggagtctatagctgtcgcggtcgcggtatctgtgacgtccggtctttcgcggcaggatgcttcgatggaagggcagtccgacaaagcgtcgggaaccgggcacgatgctgcggttcggaccggccgggaggggcttgccggatcgtctgccggtcaggtggttgctccctcctctgaagccgatgccgaatcgaagcagaaagtcgtcgtatcggacagtctgttcgatctggacgatctggtgatccgtcacagggagaagcggcgggtcatcatgtctctctacgagacggacgggccgcaggaagccgctgcttcgaagattccggtcgggaccgggcagaagccggggcatgcagcggctccgcagcaacaggcaaccgctggaaaggagcaggacgatgcagcggctccgcagccggaaacactcctcgaaaaaatggatgaaccgaagaagtccgtaacgtcgcaaataccggagccacagtccgaaacatcggaatccgactctgttgccgcagagatttcggagcaagcggataatgcggcggatgccgatgcttccgttgccgcttcgcaaaagacgggcgtcgccgaaacgacttcgactaaaaccgatgccccgaaatacccgtttgccgccgagccggagccggtgctgggcgaggtgttgggcggtgacgtgcatacgctggccgacacgatcgccgcgccgaaggacatggcttccgaaatcgtgcgcaaggagcggatcaccgacctgaagcaggcgatcggtatcaacgacaaattcctgttgctgcgggacttgttcggcggcgataccgagcggtacgaacggacgatcgaccgtctgaacgagtttgacgacctggacgactgcattatctatatctccgagaattacgattggaacccttcgtccgacggagtgaggttcctgatggagttgctggaacgtaaactctcctgacgatggctaagctctatatcgttcctacgccgatcggaaatttggacgacatcacgattcgggccgtcagggtgctttccgaagtcgattttattctggctgaagacacgcgcacctcgtcggtgctgctcaagcatctgggcatcgagaaaaagatgtatgcccaccacaagttcaatgaacatgcgacggttggtctggtggccgacaacatcgcccagggccgttcagcggctctgatttcggatgcgggcacgccgggaatctccgacccgggattcttgctggtgcgggcctgtcttgaagcggggatcgaagtggaaacgttgcccggggctacggctttcgtcccggcgctggtgcagagcggctttccgtgcgaccggttttgcttcgagggttttctgccccagaagaaaggccgcaacaagcatttgcagagccttgcgtcggagccgcgtacgatgattttttacgagtcgcctttccgggtggtcaagaccctcgaacagttcgccgaggtgttcggtccggagcggatggcggccgtgtcgcgggaactgaccaaaaagttcgaacagaccgtgcggggaacccttgccgaggttgcggactatttccgggaacatacgcccaaaggagagttcgtgatcgtggtggcggggcttccgaaaccgggaaagaatatggatacagaatccgaagaagagtaaatgagtgatatggaaaatagtgaattgaaagagcagccccgtcattcgttccgactttgggcggagttccgggcctttatacgggaccgtttcagtctggaggatgacaaggcctcgcaggatgaagtagctgctaacatcagcaagggtacggagtttcgcggcgtcaatttgtgggtcctgatttgcgcaacgatggtggcgtcgctgggactgaatgtcaattcggccgccgtaattatcggcgccatgtgtatttctccgatcatggggccgattatgggtatcggcttttcgctcgggatcaacgatttcgacctgctgaaaaaatccgtcaggaacttcgtcctgatgttcgtcgtggcgatttcgacttcgaccctcttctttttcatctccccgctggggaatgcgagcagtgagttgctcgcacgtaccactccgacgacttacgacgtgttgatcgcctttttcggcggtatggccggtatcgtggcgcaatcgcgccaggatcgtaattcgaccgttattccgggcgttgcgatcgctacggcgttgatgccgcctctctgtacggccgggttcggtctggcgacgggacagtatcgttttttcttcggggcgttttacctgtttttcatcaatacggtttttatcgccctggctacttatatttttacccggtttctgaagtacaggaagaagacgtttctcaacaaatcccgtgagcgtttcgtgaagcggacgatgctggcgattacgctcgttacgtttattcccagcgtattcatcggcttgcatatggtgcgggtttcgattttcgaggtgcaggccgataagtatatcgcccaggtgttcaatttcccgcagacccgtgtgatcgaatccagcaagatctaccggcggggcggagaatcgccttgcatcgagttgttgctggtcggggaaccgcttggcgaagatgtgatcgagaatgcgcggggacagctcgcaagctatgggctgcctcggacagaattggtggtgcgacaggcatcgaactcggataaggtcgatttgcagtcgctgcagtcgagttatgtggagctgctggacgagaagaatcggcaaatcgccgagatgaaacagcgactggctcgctatcaggtgacgaatgtcgatatcggcgatatttcgcaggaggtgggtgtgatgtcggataacgtgaagtcgatgtcgcttaccaaaggggtgatgttcgacgttgcgggcaaaccgctggatacgctgttggtctgcgttattacgccgaaggatttccaacgccagatagaccgggagcagttgcgcaagtggctttcggtccgcacgaaggtcgataatgtgaaactgttcgtagaaccgaaatcgaatgagtaagccggaggtagaaagacagaaaagcccgaatctgggtttttggggaaggatcggactggaaagcctctggattttctgtaagtttttctccattttgccgtattggtttcgctattacgtggtggaaccggccgttttcggtgcgttgcgcctgttgcgttaccgttatcgggtcgtgacggagaatttgcggaactcttttccggagaaaagcctggaggagttgcatgctatccggagaggtttttaccgtactttggcggagattttcgtagataccttcagtctggccggactcaccgacgagaaatgccgtcaggtcgtcgtcgtaaaggatctggaaaagcagatggctgcggtcgagggccgggactggatcgctctgacggctcatttggggtgctgggaatactgttcgttctgggggattatcgtcccttcgcaggtggtcgtggcggtctatcatcccctgcggagtcgcgttttcgacgaattgtacaaacgtctgcgcagccatgcgaatatctgtccggtaccgatggctgagtccctgcgcttctatctgcgaaatcgggagaagggaatcgacggcaagaatatcgtgatgggactgattgccgatcagaatccgccgcgccgtcccgacagccattggttccgcttcctcaatcgggatacgatctttttcgacggaggggagaagctggcgctgcgttgcggtctgcccgtatattgctgttggctgcggcgtgtcaaaccgggttattacgagatggatttcgaccggatttacgacggagaagaggaggtggctccccatgaaataacggaacgctacgtgcggcgtctggagcagaagatccgcgaataccccgacctgtggatgtggtcgcacaagcggtggaaacacaagtccccggccgatctggcccgcatggaatgcgaacgaaaacagaaatagtgatcctgaattggaacggtgccgggcatttgcgccgtttcctgccttcggtgctcgcatcggttcccgaaggggtcggcgtcgtcgtggccgacaacggttcgacggacgattcgctcggcgtgctcgaacgcgaatttcccgctgtggggcgaatcgtactggaccgtaactacgggttcgccggaggttataaccgggcgttggagtatctcgatgcggactatttcattctgctcaattcggatgtcgaaacgcctgccggatgggtcgaaccgctcgtcgaaacgctcgatcgggatcggaccgtggctgccgtagcgcccaagctgctgtcgctcgtcgagcctgcgcggttcgagtatgccggagcttcgggcggtttcatcgactacctggggtatcctttctgccgaggtcgtattttgcagtgtgtcgaacgggacgaagggcagtatgacgatgcccgcgatgttttttgggcgagcggcgctgctttctgctgccgggccgaagtatttcgggcattgggcggtttcgacgaggattttttcgcccacatggaggagatcgacctttgctggcggatgcaactggccggttaccgggtgcggatcgagccccggagccgggtttatcacctcggcggggggagtctggcgcagggatcgccttcgaaggtgttttacaaccatcgcaataatctggcgatgctctacaagtgtgcgtcgccggtgcagcggagcgtcgtggctatcgtgcgtccggtgctcgactcgtgcgcggcgctgtcgtacctgatgcaggggcgtccggattacgtgcgggccgtgggacgtgcgtggcgggattttctgcgggcgcacaaggcgctggccgccaagcggcgggctgttcgcggtgcggtgaagggaaagccccggggcatatactgcgggtcgatcgttctgcgttatttattaggtcgcagacggttcggcaagttgctgtaaaggggcggcgattcgaatgcgaccgctgccttatgtgtcgatgttcggacgggggcgatttaagctggcgataatatacttttgtgtacctttgggggtgtgtagcggcccaagtcctctccgagaggagatccggagaggcagaattataaatgcggctgcgaatcgcaaataagcggctgccggattcggagctgtgactgtcggataaaggtacgctgaaatacataattaccctgaagaaagtatttggatggaaaaattggttgtcatacctacttataacgagcgggagaatatttcgaagatgatctcgaaggtgatgtcgctcgagggcggttaccatttgctcgtggtggacgacggctcgcccgatggaacgggagcgatcgtcaaggagcggcaggcggagtttccggatcgtctgtttctgttggaacgctcgggaaaactggggttgggcactgcctatatcgagggattccgctgggcgctggctcgcccgtacgatgccgtgttcgaaatggactgcgatttttcgcataatcccgacgatctgctgcggcttaccgccgaattggaggccggagcggatgtcgccgtcggttcgcggtattcgaaaggagtgacggtggtgaactggcctatgtcgcggctgttgatgtcctattgcgcctcgcggtatgtgcggatcgtgacggggatgcccgtctgcgatgcgacggccggattcgtcggctataagcgggaagtccttgcggcgatcgatttcgaccggatcgagatggtggggtacggattccagatcgagatgaaatatacggcctggaagatgggattccgcatcggcgaggtgccgatcatctttgccgaccggaccgaaggaacctccaagatgtcgggcggtatcttcggcgaagcgttcttcggggtgctggccctgccgtttcgaacgatcgcccggaagaaataacgatcgttgcgttgccgggaagtgtattcctcttatgcgggcggtaaatagagtgttgagagggaaaacggagaaatggttacgataagggaatatcggacgacagacaaggatgatgtgatggaattgatccggcggaatacaccagaatattttgcggcggaagaagaaattgatttgagtgattatctggatcgagaaatagagttgtattatgtgctggtcacgaatgacaggatcgttggttgcggcggaataaattttgccgatgataaaaccgtcggcaaaataagttgggacatcatacatcccgattatcagggaaaatcgcttgggaagcaactgctcgaatatagaatcgacaagttgaaatcaattgatcgtgtccgcaagataaccgtcagaacttcgcagttggtttataagttctatcagaagcaaggctttgtgttgaaagcgacgcataaggactattgggccaaaggtatcgattggagtatgaaggaaattagaacccctctgtattttaaaatgtaagatatattttactcctgaatacagcaacgacagggcgtcggaaattttccgtgaatgtccgatatggagtttacggcgaatattgaaaacacgatttatcaatcgaaaagccggagcttcgatagctccggctttttcattttaccgtagaagaaatatctatttgttgatcttggcccacgaatccttgagggtcaccgtgcggttgaataccgggtgtccgggcttggagtccgtgtcggcgcagaaataccctacgcgctcgaactggaacggctgcccgatgggagcctccccaagcgacggttccagatagcctcgggtgacgatcatcgaatcggggttgagattgtcctcccaactgccgccttcggccacgtcgtcgggatcttcggtcgtgaaaagcgggttgaagagccggatttcggcttcgatcgcatcggccgccgatacccagtggatcacgcctttcacgcggcggccgtcgctcgacgaaccgttgcccgactccgggtcgtacgtgcagcgaagctccgtgatgttgccttctgcatccttgacgacctcttcgcatcggatcaggtaggagtagcgcaggcgcacctccgtaccgggactcaggcggtagtatttcttgggcgggacctccatgaagtcgtcgcgttcgatatagatctcgcgcgagaaaggcacctggcgcgtgccggcgttttcgtcttcgggattattgatcgccgtgaaaagctcggttttgccttcggggtagttggtgatgacgactttcagcgggttgagtaccgccatgcggcgttcggcgaccttgttcaggtcttcgcgcacgcagaactccagcttgcccaggtcgatcacgttgtcgcgcttggctacgccgaccatttcggcgaagttgcgcaccgaagccggcgtataacccttgcggcgcagggcgcagatggtcggcatgcggggatcgtcccagcccatcacggcgccctcctgcacgagtttcagaagacggcgcttggacatcatcgtataggtgaggttcagacgggcgaattcgtactggtgcgaggggtagatgtcgagcgcttggatgaaccagtcgtagagcggacggtgcacgtcgaattcgagggtgcagatcgagtgggtgatccgttcgattgaatcgcactggccatgcgcatagtcgtacatcggatagatgcaccatttgttacccgtgcggtgatgctcggcgtgcaggatgcggtacatgatcgggtcgcggaacagcatgttcgggtgcgccatgtcgattttggctcgcaacaccttctcgccgtcggcgaactcgccctttttcatccgctcgaacaggtcgaggttttcctcgaccgagcggttgcgccaaggcgactccttgccgggctcggataccgtgccgcgcgtgaggcggatctcttcctgcgtctggtcatcgacataggccaatcctttcttgatcaggacgacggcccagtcgtagagctggtcgaaatagtccgacgcatagcgttccaacgcccagtcgaaacccagccaccggatgtcgcgcttgatcgaatccacgtactccacgtcctccttcaccgggttggtgtcgtcgaaacgcaggttgcacttgccgccgtatttcttggccaggccgaagttgatgcagatgctcttggcgtggccgatatgcaggtagccgttgggttcgggcgggaaacgtgtctgtacgcgcgtgtcgcccttggcgatggactcctgaatgatctcttcgagaaagttcgcggctttctccttggtattggtgtcgttggttgcgattgccatagcaggtatatttttcacaaaattacaacttttttccgcctttgcgtctattttttgggacggtaaacggttttttgcagattgaccgatactttcaggatctgttgcaggcccaggcccacgccgtcgtaatggaaatagaatccggccgaaacgcccaccgtgttgttgaagaagcggcggttgtaggtgacggccgtctggttgtagatcttcttgggggttgcgtaaaaggggccgctggcatagagtccggtgccatagatgtcccagaaggggagcatgttctcgccgacgtagagttcgttgagcaaacagacaccccagcggcttaccgacagggtgaggcgcccgcctttgggcgctttccagccctcttcggtgcggcggtcgcgctgcaggctttgcaggtaacccagccgggcatcgaaggtgtaggctccttcgtagcggtagccgacgtagggattgagcaggatgtggtccacgaccccttcgtccaactccgtattgtcggttttggcgtagtggagcagggtcatgacatagccgccgtaccagtggcgtcccttgtattcgccgcccgagaggatgcggaacttctcgcgcgtctggtacgagcgcattccctcccagtcgatggcgaactcgatgaaggagcccgtttgggatttatagtgggcggccaggccctggatgcgattattatagaacgagtaggcactgcccaggaagaacggatcgtatcgggccagcagcagggagcgcgggaaaataccggctacggcctgtgccgtcttcgagttgaactggtagtagatctgggggtccactttactcaagaacttgtgttccttgtcgccgaagtcttgcaacagatcgacggctaccaccagccggttcttttcggaccagataacacccgctttcggggtcaggcgcatactgaagaacgtgtgcgaatcgtcgatgttgcagtccgagtgttcgcggttgtcgaaccgggtgtcgaagtcggctccgatgaaaacctcctgggccgaggcgccggcggcagccagcagaagtgtcaggataagtgcgatttgcttcataggcgatcgtagtcgtttgtcgcgcgttccgtccggttgccggtccgccgggcggagccgtctgcggaacgggacgcttttgcgtgtatttaggtcgccaaagttagctaaaatattcggatttgcttacttttgccgtgaaaacagggaagttgtaacgatgagaaagattaccaacgaagagctggggcgtccctctgccggggagttcgcccgtatggagaaaatgccggtggcggtcgtgctggacaacgtacgctcgatgcagaacgtcggggcctttttccgcacggcggacgcctttgccgtcgaacgtatcgccttgtgcggcatcaccgccaccccgcccaaccgggagatccacaagacggcgctcggagccgagctgaccgttgcgtgggactatttcgccgcgacgaccgactgcatcgctgcgctgcgtgcgcaggggtatctcatttacgtcgtggagcaggtcgaaggagccgtcatgctggatgaattccggcctcgaccggggcagaaatacgccctggtgttcggcaacgaggtggacggcgtggcgcaggaggtcgtggatgcggcagacggggcgatcgagattccgcaggccggaaccaaacattcggtgaacgtttcggtggccggaggagtcgttttgtggaactttttttggcaagtccggccaaaacgctaaatttgccccgggttaccggtgggaaaaggaggaatacccggagggttcccgattcgaaaattgaaaatatataatgctatgtcagtagagagtacagtgagggcggtcacgacgtatcgtctgtgggagatgaagcagcgccgggagaagatcgccatgctgacttcgtacgattattcgatggcccgcatcgtggatgcggcgggggtcgatgtgattctggtgggcgactcggcggccaacgtgatggcgggttacgaaacgacggtgcccattacgctcgatatgatgatttaccatgcccgctcggtcgcacgcgccgtgcgccgtgcgctggtggtggtcgatctgccgttcggtacgtaccagggaaattcgaaagtggcgctcgagtcggccgtccgcatcatgaaggagaccgaggccgatgcggtgaagatcgaaggcggcgaggagatcctcgaatcggtgaaccgtatcctttcggcgggaatccccgtgatggggcatctgggcctgacgccacagtcgattcataagttcggtacctataacgtgcgggccaaagacgaggaggaggccgagaagctggtgcgggacgcccatctgctcgaagacgcgggatgtttcgccatcgtgctcgagaagattcctgcggcgctggggacccgggtcgcctccgaactgcggattccgatcatcggtatcggggccgggggcggcgtggacggacaggtgctcgtgattcacgatatgctggggatcaataagggtttctcgccgcgtttcctgcgccgttatgccgatttgcacgaggtgatgaccggtgcggtcacgtcttatgttgaggacgttaaatcgggcgatttcccgaatgagtcggagcaatattagaaatacgggtttttatatcctctttatgtgtatcggaagttcccggcggagcttccgatattttttcgttatgtcctgtttcctgcgaaccgatgcttgaggggaataggctttcgtgccggatggacggcgcgagaccgtattgtggctttcaccgctgtatgtacggcgatatgtcggcggcggggtgagagtgccggatccattacggggattgccgatctcgaaagttcgggaaagggacgggaacggatttgtcccgatcttcgaaaatagcgcacgtttcgtttggaatgcaataatttatttgctatctttataaaagaatgaggccgaaatcccggcagacaggccgattcgggttttgaccgcaggtgaagatcgattgagaatgaatggcgggagggtatcttctggcgaagattcccgctgctgacccaagtaaataaataattaaaccgctattgcttatgaaaaagaagatcgatgcgacggaaaatccgtccagactggagaacgcaagtgcaagggcgttgtccgccgaccgttccgaacaggcatcccgtcccggaacattcagtactatgatgagcgaccgcgtgattttttcttcggcatccgcccggatcgtcgctgcggaacaggtaaagggaaacaaaatcgcagcgatgaagccgggtgcggacacttcgctggcatcggctgccaactggaaaacgacgaacggcagcaacctttcgttcggaaattttcacggtaaatcgtgtatgaaaaccgtaggtgccggatcatcggcaggggtctggctcgactatttcgaagatgccccgctttgttcccagggacggccgatggcgacttcggtcgatgtcttcgccgaggctccggcgcagattcgtttgggagctgcggatgaaacgaaaagtatcgtcgagcttgcggaatatcaagtggggcgatggattcggatatcgacggttttgacaccgaccggtatgcggaattttcagatatataataataccgctggagccattgtatatttccggaatgcgaaggtcgagttttcctcttcaccgacactctatacgccgcaaacccaggataatatttggcatgccgatttggaatttctttacggttacaacaactttgtgaaaaacgatcaagtctatttccttcagaaaaattcggcatccggtgctgcaactcgtcaatattggaaactggtaacagctgcgggagaagactggatcgagttttcgagtaccgattccgaaggaaccggcgagccccagccgggcgattggatcgctcagctcggtaatcgcagtgatgctaaacgccagtcagctttagtacaggaatttacttcagaaggtaaaatccttgtcgtatggtatgaaggaattgattcgtttagtatgaccgaccgggatcgtatgcatataggcaacggagctatggatgctgaagttatgaacgtgggtacaattaattcttcaacgatcaataataaaggcgaagtggaaactaatacgttgaatgtcaagagtcggatcgatgcggggaccatcgtcgccacaggcaatatcacgacgaagggaaccctgaccgcttcaaagatcgagggcgatttccccatggatataccggatgacttggaggttaataccgttacggcttcggggactgtgaaagctctcaatggagagttcgataccgttacagtgaaagataaaaacattatattaaatcaagaaggaatcacctgtaaaggacccgcattagcaggtaatttgtctgcgaatggaattgtattgaaaaaggataatactacatatattgaattatcaactttaggtaatctatacacggttatccgtctccataatcttccacaaggcggccctaaagattctcggattcaaaccttacccactaatcatatttttatcaatacagatgaaccttttgcagaaaatcaatttggtaaattttaccctttaggtatcaaactataacgatattcactgaaaagagaggaaaattttcctctctttttatagtttcttgatagttaaacatgcaaattctgtatcgtccgtattttctgaagcacctaactgttgccaggtcgtattttcgagtgtgcagagcaaaccgttgatttcccactgttggggattcagaacgcgatatacattctccgatccgctttgtaattcaaattccggttcttcaggagataaacatatcttgcacgcatattgtaaatcatgtagaggattcggatctgcaattgtggccgtgcagtataatttttctaatctttgtcccggtaaattcgtaaatccgagaaaattgaccggacgagttcttgcataataggtcgcctttaatatatcagagttgagtgtattttcattgtctatattattttctaattgcatgagtggtgtcccgaaggtgtaataaaatgcatcgcatcgaatctcatttgtcacaattgggatagtttggaatcgacgtatggatagattcccaatggaaacaattgcttcgacggtaaaattgtccgttacatctgttaagtcaatcgtaatttgcgatgaattcatattgtaatcgggattgattatatatgaggatgaatgatctgttttccccataataggagccgaacagttccaacggacattacacttttctttggcaggagaaagccaccagattgattggatttttgctgttttttcttgaatgatttcttcaattaaggaataatagtttgtaagaattactgatgtttcttcccaaacttccacgccatagacatcgtgaccatctttataaggaattcccagttcgtcaccgatcggatcgaaattggtattgtcgtccgagcaggaggttccggaggcgagcaaaagcgttgccgtaataaaaagcagaattcttttcatgatagaagagtgtctaacgtatcatgtatcttttcggtgattcggcttgcaggacgatagtttgccgatgcgccgtctatatttttatgaagtaaaaacttaaaatcaagcccactatattaattaaacgatagaattgtaataaaatttcatacgggaattgttttttgaaaaaggtgatacttggatgccgaaacctcgctccccagaggcaaacaatacgcttcggcagcgtcgtggtggcttgatgcccgtgattttgaaacggtcgccctgctgtaaggatgtttttcttgctgtggagccgattttttggaaattcggggagtgtacgaaaaataatccaaaaattatgattacttttgcaggcaacaaaatctcactcctatgtcttttatcaatgagaaggtgcaacccgaaggactgacgttcgacgatgtgcttctggtgcccgcatactccgaagtgttgccgcgtgaggtcagcgtagtgacccgtttttcccgaaacatccaactcaacatcccgatcgtatcggccgccatggatacggtgaccgaggcgcctctggctatcgccctggcccgcgaaggcggtatcggcgtaattcacaagaatatgtcgattgccgagcaagcggctcatgtgcggaaggtgaagcgtgccgaaaacggtatgatctacgacccgatcactatttccaaggacgataccgtaggcgatgcgctggcattgatgaaggagaacaagatcggcggtattcccgtcgtggctccggatcagcatttgatcggcatcgtgaccaaccgcgatttgcggttccagcgcgatatgaaccgcaagatcgacgaggtgatgaccaaggaggggctggtgaccactcacaactccgacttgcagcgtgcggccgacattctgctgcgcaacaaaatcgagaagttgcccgtagtcgatgccgacggcaagctcgtcggattgattacctataaggatattacgaaagtgcaggaccatcccaacgcctgtaaggatgcgaaaggccgtctgcgcgttgcggcgggggtcggcatcacgcccgacgtgatggatcgcgtgaaggcgctcgtcgatgaggatgtcgatgccgtcgtgctcgatacggcccatggccattcggtcaatgtgaagaatacgctgcacaagatcaaggcggtttatccggatctggaagtggtcgtaggcaatatcgccacggccgaagccgccgagttcctgatttctaacggtgccgacggcgtgaaggtgggtatcggccccggttcgatctgtacgacccgcgtcattgcgggcgtgggcgtgccgcagttgtcggctatttacggcgctgcgtccgtagcccgcaagtacggcattccggtcattgccgacggcggtttgcgttattcgggcgatatcgtcaaggcgcttgccgcaggcggcgactgcgtgatgatcggttcgatgttcgccggtacggaggaggctccgggcgaaacgatcatttacaacggccgcaagttcaagagctatcgcggcatggggtcgttggacgctatgaaagccggttcggccgaccgctacttccagaagggcgatgtgaatatcaataaactggtcccggaaggtatcgtggcccgtgtgcccttcaagggaatgctttcggaaacggttttccagttggtcggcggtattcgcgccggtatgggttactgcggtgcgcgggacatcgaggcgctcaagcaggctcaattcatccgcatcacctcgtcgggtatgcaggagagccatccccacgatgttgccatcacgagcgaggcgccgaattacagcagcgagcgctaaactcctgacgcactgatgccgaatatccgaagaaatcggttgcgaacgacccgatacgattgggcggcggtgttcgttgtcctgacgcttttggcgatctggtggtttacgggctgtcggcacgcatggatgcgccatctggtgttggcatcggcgcttttctattttttcgtcgtccgtatcgccgtgaacctgtaccgtatgaaaaaggataattcggaaaatgcgagtgaagaaaataaaaaccaaatagaatagatgcaggaaaaaatagtcattctggattttggatcgcagtacacgcagttgatcgcacgccgcgtgcgtgaactcaacgtctattgcgagatccaccctttcaacaagatccctgaactggatgcttcggtgcggggcgtcattctttcgggaagtcccttttccgtacgggacgaaaatgccccgaagcccgatctgacggcgatcaaaggtcgtctgccgttgctgggcgtctgctacggcgcacaatacctggctcatttctacggcggcgaagtgcagtcggctcccagccgggagtacggacgtgcgatgcttacggtcgtcgagccgtccgatccgctgatgcagggagttccgtcgcctacgcaggtgtggatgtcgcacggagatacgattacttctgttcccgacacctaccgggtgatcgccagcacggaggacgtgcgctatgcagccttccgtatcgagggagagcggagttggggtattcagttccatccggaggtgtaccattcgaccgacggcattacgctgcttcggaatttcgtggtcggcatttgcggctgcaagcagaactggacgccggagagtttcgtcgaaacgaccgtccgggagttgcgtgagaagctgggtgacgaccgtgtcgtgctcggtctttccggtggcgtcgattcgtcggtggctgccgtgctgctgcatcgtgcgatcggtaagaacctttactgtatcttcgtggattcagggcttctgcgcaagaacgagttcgacagcgtgctcgaatcgtacaaggggatgggtttgaatgtcaagggtgtcaaggcccacgaccggtttttgggcgacctggccggagtgaccgatcccgagaagaagcgcaagatcatcggccgcgatttcgtggaggtgttcaatgccgaggccaagcagatcgagaacgtaaagtggctggcgcagggtacgatctatcccgacgtggtggagtccgcttcggcatcggtcaagggacctgccgcgatgatcaagtcgcaccacaacgtcggcggcctgcccgaagagatgcacctgaaaatcgtcgagccgctgcgcctgctctttaaggacgaggtgcgccgcgtgggtaagtccctcggtatcgatccgcaattgctggggcggcatccgttccccggtccgggccttgcgatccgtattctgggcgatattaccccggagaaggtggaaattctgcagaatgtggacaaaatctatatcgatgccctgcgcgagtggggactttacgaccaggtatggcaggcgggagcgattctgctgcccgtgaagagcgtcggcgtaatgggcgatgagcgtacgtacgagagctgcgtggcgctgcgtgccgtagcttcgaccgatggcatgacggccgactgggtgcacctgccgtacgattttctggctgcggtgtccaacgatattatcaacaaggtgcgaggggtcaatcgcgtagtgtacgacatctcttccaaaccgcccgcaacgatcgagtgggaataggaatttaggtcgaaaatgcaaaagacggaaaccctgcggtttccgtcttttgcatttgtaaaatgtcggttctttggcgggagtttggcggccggcctttacttgtgggggcgttcggaatgggttaaacgcagcttcggtgcggttcgctgttatgcgagccggtacagtatcccttcgtaaggccgtagttcgatcgggccttctttttcggctatcggtggggcagggtagttatgcagcaatggcatggcttcggtcaaatccgttttcgggtcgaaccgggcagccttcgggctgaagttcaggactgtgaggtagtttcggcctgtcccttcccgcaggtaggcgaatacctgcgggttgtcagcatcgaccggccggaacgagccgtaaaccaggtccggatgtcctttgcgcagcgttacggcccgtctgaagaagttcaatacggaatcggggtcgcataactcccgggcggcgtttacctccgtgtggttgggattgacgcgaagccagggtttcgccgtggagaatcccgcgtagagcgttccatcccattggtagggcgtgcgggcgttgtcgcgtccgatttcctgctgctcgcgcaggaattgttccgtatcgccgccttcccgcaggagtttgcggtagtggttgcgcgtgtcaatgtcgtcgtactcttcgatgcgggtgaatcggatgttggtcatgcccagttcgtcgccggccagccaatagggggttccccgcatcgtgagcaggaacatcgtgagcattttggccgacaggtcgcgccactcgggggcgtcgctgccgaagcgcgaaaccatgcgcggctggtcgtggttgcccagatagatcgtaggccagccgtcgcctacggctgcgtcccattcggcgtacatacgcttgagggcgagcaggctgtacgggataccggttgcgggatcgtccgcctccgtttcgttgcggatgtccgccgcgccgaagtggtagagcatgtcgagctcctgccgttcgggtgcgatgaatttccacccctcttcgggggcggttttcgagccttcgccgacggtcgtacagtcgtagcgggagaatacctcgcggttcatttcgtgcaggtagtcgtgcaggtgcggtcccagcgagtaatagggaaatacgtccgggtatttgcgaaggtcgatctccggaaacgacgtgtcttttgcgatgtagggaatcgaatccagacggaatccatcgacccccttgtcgagccagaaacgcagaatgtcgtagatttcggcccgcaccttggggctttgccagttgaggtcgggctgctgccgggcaaaatagtgcaggtagtaggagcgtgtcggggcgttgtaacaccaggcatcgcccttctcgtcgaaatggctcttgcggtagggcgggtggccctgttcctccggccaccagaggtagtagtcgtagtaggggttctcccgcgaggtgcgggcctcgcagaaccagggatgctggtcgctggtgtggttcagcaccaggtcgaggagaagacgcatgccccgtgcgtgtgtttctttcaggagccggtcgaaatcctccatcgtgccgaagtcaggcatgatctgccggtaatcgctgatgtcgtagccgttgtcggcgttgggggatgcgaagatcggattgagccacagggtttcgattcccagcccatgcaggtagtcgagtttttcggtgattccgttcaggtccccgatgccgtcgtcgttgctgtccttgaaactgcggggatagatttgatagacgatcgtttctttccaccaggctttttgcaaggcaggggatggaggagtgaatatgggcatattgttcaggattctgttatacgatcgcaagataagaaaaaagagaagtagaaggttcttatcggaggaaaaaacgacagggagtcaaagactccctgtcgttcgattcatatttttatggcaatcggattttacaggctacctccctggcggacggaaaaacgaaacgagcggactttttcgacaggcggttgcagatgtccttcgtgcagatatgggaacacccttccgcggcaatcgagatgcggttctgctctgccgatggcgtgcggaatgcttcgattcagatatttttcggatttttcaggtggaacaggagcgaaggcaggattacgtcccgccaaaaattctcgggcagtaaggtgcggtatttccagcggcatgagaagagtttgcgggttttccggccgatacgggtcaggcggttacctgacggagtgcggtacactccgaagccgagaatgtcgttcagtacccgctgtttgagctgtggatccggaacggcagagagcagcggtgtgaaatcctcgtcgagcaattcgccggccaatgccgtgaaaatgttatagaccgtgtcgtaaccggttgcagcgtaaagcgtaaggattttctcgaagtcgatttccgattgctcgctgcgcaggaaaaggccccaatccagcagatgtcggaggttgatgccttccgtcccgaaatgccgggccatgtggcgcagcagatagagtgcgttgaacatcggggatggggtgtaatagcccgccggcgctaatcggctgttctctgcttcacccacgagaaaatcgtctatggcacgctccgtccggcggtgcgacggcataagcagatggctgtgattttcgaccatgacgcccttgtaatggaaaacggcatgtttttcactatcgtaattgattttaatccccagctcttcgatcaaacggttgcccttgtcgcagtcgtcgagccacagatctatgtcgccgcattcgcggtgctccggccgggggtagtaaatgctgaggcccagccctttcaaaaggatcgtacggacgccgtgcgaagcgaagagcgttgtcagttcgtgtgcggcacgggtctgttgggcatggcgcttctcgatggcttccgaactcagggcccaacggattttgagggctctggagggctgttgctgttccgggagccggagaatcgtgtcgaagagcagggccgtaacgccgtgttgggccgcaagggtaaaaagacgggtccagtcttcttcagacaagttcagtatgtttggctgtaatatgctaggggtaatggttgggcgcaacaatgcaagcagcaaagtatgaagtttatacgtaatatctttttgcacatattccggaaatggctttattggtcgatcatatactttgctgtttttcatgttatcaacttgtaatttttatatccggatgttgtttatggctgcttgattgacagatggttctaatgtatatccttaatacgaagcataaatagtacgattcgatttatcggataaatttttttatggatgaaacaacttcgagaatctgttcgtcggttaaagaggggccggaaggaagacatagtcctcgttcgaagatggtttccgcaattttgtttccataatatgcgttgcgtgagaaaattggctgcatatgcatcggacgccaaagcagacgtgattcgatattctcctgttcgagatgtatgcgaatgtcattcgctgttttgttattgcattttttcgcatcgacttcgatgcaggtcaaccagaagttcgaatcgtattcggaggatggattctgcttgacatgaattccttctgtgtccgcgaagttttcggaataaagtgtatgtattgcccggcggcgtgcgatatattgttcgagaacagtcatttgacctcgacctataccggcgcaaatattggataatcggtagttataaccgatgtgtttatggtagtaataggggcgatcttcacgtgcctgcgtagcgtagaaaattgtgcgtttcgcctcttcttcggttctgcaaatcagggcgcctccgccagaagtagtgatcattttgttgccgttgaacgacagcgctccgaattctccgaaagtgccgcatttttgccccttgtattcagatccgatagcttctgctgcgtcttcgcagattggaatattgtacttttcggcaatggcgcatatttcgtctaatttggctggcatgccgtacagatgtaccggaatgatggctttaggatattttccggttttagcttttcgatcgtggatggcttgttccaaaaattgtggcgacatattccaagtttcctcttctgaatcgacgaagacgggtgttccgcccaggtaggttatcggattggctgatgccgaaaatgtgaacgattggcaaatcacttcgtctccgggacctattcccaattgcaaaagtcccaaatgaatggctgctgtaccggatgagagggcaacgatatgtctgccctgtccgatgaaagtttctagatctttttcgaatgcattaacgttggggccgagcggaacgacccagttggtatcgaatgcttcttgaatgaattgctgctcacagccgctcatacgtgccagcgagagatggatgcgttgtttcataacgaattatttttgaatttccggagtcggatacgtgtggaaaatcgtttggaaaattagtttcagatctcctcgaaaagtgtgggtataatagtagtcgagattgatttgaactttgtccggaaaaattatttcattgttatattttacaggatcggggacttgtgccagtagctcttcctcattggcatatttgagcgaggctggtccggttattcctgggcgtaatttcagaatgagtttattttctccagttagttgatccgcatatccgggtacatcgggacgtggtccgacgaaactcatgtcaccgatcaatacattccataattcggggagttcatcgagtttatattttctcaaaacggcacccaaaggggtgattcggctctctcctgcaatggaaatactggagcctgaatggattacttgcatcgaacggaatttatacatcgtgaagagctttccctcttttccgacacgaacctgttggaaaatgacagggcctcccggcattttgattttgatcaaaatagctatgattagtagaatcggacataaacaaatcaaccccaagaatgatgccgtgcggtcgaaaatccactttgcgtccattgtaatgacaattatcgaaaaattttatacgcgattttttttacccaagcaggggcgatgagcagacagaacatggcataggcgaataagtcggcggtatggccgtagtgcaagtttttgttgatttgcaatctgtccgccaattgtttttttgcaaaaacccatccattccggcgctttttgaacaaggcttcggtcattctgaatttcaatactacgttcggaagatttgctatattcactccatgcattaggccgtcgtaccaaagcatcgtatcttggtttttccgatattcagggcggtaacaatgtccgattttatcaaaaaaacttttgcggaataaaacggcgggatgggcgaggggatttcttttcgcaaaaaatttcttgcattcggtgggagtcgctggataaacgattgttttcccggattcgcaaccttcttcgtcgatttcgttgatagcccctccgacgacatctatttcggggtgttcattcagaaaacagatctgtttttcgatgcgatccggcaacgagatatcgtctgcatccatacgggcgatgtattcgtaaccgttgtcgaaacatatttggagcagatcgtttaagacgcaggcgagtccccgattctctgcaaaacgtacaatcgatacgtttttgttattttcatacgcttccagacatgaatttaaggaatttcctatgggaccatctactcctatatatattcgacaggaataagtctgttttatgatgctgtcaatagcggggcggacgtattggggcgtatcgtttttataaacggggataatgacggcaacaggataattcatcgtgattagagttttgtatatttttctattatgtccatccactgctgcaaaacggtatttttgtcgactaagtgtttgattgtattggatgcgcgaagtccgatctcgcgtgcagccgtttcattttccgatagatatgaaaatgcttgtgcgatcgagtttgcatcgtcggcgaagcatccgtttatgtgatctataattagttcttttgcaccagatacttttgtactgattacaggcaatccgaggtacattgcttctatcattgcattcgacattccttcatagtcggaagataggacgaatacttgtgccgatttcatttgtgaagctatgttagcagacctgccttgtaacctgacacgacatccttttcgttctatatattcttcgagttcctgtcgcatagggccttctccataaatatctaagcagtgatcaggatgggttttactgaaaagtgcaaaagcatcgatcatcattttctggtttttttgaggatcgagtcgtccgacggagattattttcttttctttgtggctgcttaatgctgattgccattcgaattgttctgatatgggattggcgattacggatatgcgcttatggtattttgctggaaaatatttcttaatctccggggtttgtacaaccatatgttgcattctgaataagagcattctccgtattatttttcggaataggctggcttttcctgggtcatttcgttcggaaacaataataggtgtccgggtaaacagcatacaagccaatgttgctacaaacacaggtaacatgaaggcgataacaaggtcatattgccgtaaatatttgcgtagccacaataatttagccgtgatgtcccggtgatgatcatctgcaaatgcgagttttattgccggatttatgtcgtatgcaatcatccgttttcttaaacatacgatgcttacttcgtaggttttacaaagagaattagcaagggtagagaggacacgttctgatccaccggaggatagggtgtccgttacgaatactattttcatcaaaaggattactttttatcggatggttgaaggcatacaaccttttttatgaggttttcccattctgcgtatattttttcgggagagtgtgtttcgcagagtttatgcgcattatggctaagattgtctgcgaaaaattggtctgatagtattttctccattgcggtctgtaatgcttccacgtcgccaatgggggttagcaatccatttgtcccgttttttatcagaaatctcgcgcccccacctttgcagtcggtcgatatgcagggtactcctaaagccatcgcttccatcagtgcgttgggcataccttcgaagtcggatgaaagcacgaacagtgaagaacgttcgattttcttccggatttctgtcgtgtaaccgggaaagctgactttgtcggcaattcccaagtttgaggccaataattcgaggtctttccgcagcggaccgtcgccgtaaatgaccagtttgtaggctggatatttggctgttatacccgcgaatgcttttatcaggagagcatgatttttctgttcggtcagcctgccggaggaaacgatctgcttgtttctcggacctgagtattctgcggtgatgaactccttgttgatcgcattcggaatgatttttacggctgcgctgccgatggaattcccgtaccagtttttttgaatttcggtttggaacacccagccatcggctttatgggcaactttcttcaatcgcttttgtttcgaaggagggtacgtggagggatcgacacgctccgaagcgataattttggctttggtgaggaatcgaagtgataatagcaggattgtcggtatcggcaacataactatataacagtcgcatcgggttttgcggatgagcttgcatactctgtagaaacgaagcagattgtcgtgcaggaagttgctccgttcttgctggtgcaagagtgcttggcgacttatttttgtcgaaagcggatacgtcgcctcgtcatcggatatggtgataaattcgatatcgtgttcacgttggcagagaaaattggcgaggttgcaacaaactcgttcggctcctccgcccgaaagtccgcttgtaaagaaaacgatcttcatgttattatttacgaatcaattgcaacattttgccggtgttctctccgaacaaggattcgccgttgaccatttggcaaaaccaagcactttgccctgtcgtattgacttctataagaacaacggctccttctgtatcgagagacagatcccaggacagaatccctaagtacggtagattcgcatgcatttttagtacagtttcttttattcgagtcaaattccccccccctatgttgtagcctgagaatttgacctttgtatccgggtgaaaaacaaaatgttctccttgttccgaaaatgcttctttttttagtgtaccgtctgcgtttattccgatacatactcctccgtaatggatgttatcacgatcggatgaagatcggcccagcctcaatgcgatggggcaaatatggattcggtcgtcgaggatataggttatgacccgaaacgtatttacagacgatggattcaatgtggcaagaacgtccgcttgatggattaattcctgtacaacgaaattatttccgaatttttccagtacttcccgaacggccaaagagctgccgatgtcttgtcctccgacaaagttgcatatctgcacatcgcgtccgctactggtgtctatcgtctttttcaccacgcatttgcctcggtcgaataatgacatataggcttcggctggggataacagagcattgttcccgtttctgtatatgccttttacgcaggatagataggtttgggggatgtgaaggccttctattccggagaacaatagcggcaaaaaacttttgtcgcccaatatttctgcttctctgtatggattgagtttcggctccaatcgtgtcgaaaatagaatttcggggaaataatctttgcagtatatgccggtgtagctttggtacagtctgtgccaggccgtagataacgattttccgtagttttttcggaagaattcttttatctcctgcttctgggtttcagtcagggaaactttatcgatcaattttcgttttttttggatgttctgcctttccgaataggatacgagtactcgccggatcgttcggctgattgccgtcagatgattttctatcgtatgtacagtgcccattttatcttgttttaggtggtaatgtaagccattctccgaatttgtaatcccagtcttccggttcgaacggagtcataccgctccagtggaaaaaagtcaattcgccgaaatatactttaccattgacttcgtacagatccacacgtacctgcggataacctgcggataactgggctgccaattctttcattttgtcgaaattcagaggtttattcggtaatacggaggcgttgggatggccgttacggaatggaaggtggttgtaatcggcatcgaagaagtcgaattttgtttcttctccctgtgtcattcgatcggaggcaatgaagagtgctttcacttttccgtcaaaacagaagaatttatagtcacgcagctctccggaagcattgtcttccatatattgctcggcaatgatccggggttttatgtctttgtatggccattcgcgcattccccagaaaaaattatgccgcaggcaagcgttgattttgcgatggacttttttatagttcagttttgatttgtccttgcaaacgatcacaccgccgctgtcgtgcgtacatttcagcacgaaacgttcgggtagtttcgaaaaatctatatcctcgaatttctcccatacaccgagtgtggggatgaggtattcgtgcccgatgatatcgccgacgatggcctttacttcgtatttgtcgcacaactgtgtgtatcgtggattccggtcgtagagtttgagccattgcagtttttcgctgaacgatttcgggtgttccagatcgagttttttatgcatacgcgcccaaaaagcaatcttcagatatgatttatcacttacccagttgaaatattctcggtggcccaatgtaagcagcaataaggctggattttttataatatctgttatcgaatgggacatattagtcggcggatgttgattattttgtcatttgttttttgtaggcaggattagcatgtcgcccagttttttatcccaatctttcggttcgaacggagtcataccgctagtgggaaagaaagtcagttctccgaagaaaatatccattccgatcgtataaaaatcgactcggaggaatgggattccacaactaagtgtttctgccaacgatatcatttgaggtagagttgaaggcatagaaataatgcgatcgaattgtggtgggtatgctgtttcgaccaacggaaggatttctcccgttggggtataataattagcatgatgttccgtaaaacgatcaaaatctattttgaataattttacttttccgttgaaacagaagaatttatagtcgtataattcatgggattttttatcttctatgtattgttctgcgatgatgcggggttttatgtttttgtacggccactctccattatgatggaagtagtcttcctgcaatccggtgcgtaatccgttacggactttctgcacatccatttgctgtttgtctttgcaaatgtacattcccgttccgctgttgtgattgcatttgatgacgaatttgtcgggcagagtatcgaaatccacttcttccgcttttgtccatactcccaaggtcgggatgatgtatttttctccgatacgttcggctacccacttttttgcctctattttgtctgccataatagtatattccgggcggcgattgtatagtttgagccattgcaatttttcgttgaatgtgtggggggatttccaattgattcccccccccatttttagtcgaaactttaacgacagaaatagcttgtcagatagtagattacatccgtatagaaagttgagtagtttatgtaccaacagggatggacgggagataccccggtttattttcgaataaaaggagtgaagatattcgaaacgggctttttcagatggtataggatcttgatgatacataagaaataattttatttcaatttcgatacgactgtcctcaatttatcgagatgggcttcgcagttgggatagttgagtatttgatatctcttttttcgggtaatgaacgacggcagtaggccgtgtacgaaaagtcgtttggctgtgcgggtgcaatagggctggaatggaaccagaaaattgcgacttgttttttgtgcccacgtttcgaatgttgtgttcagctggtcttcgttcgagattatttggttcaacttgtcgatgcgttctgcgaaaattttacgttcggcttcgttcatcggtataacggaaggtcgttcgttgcattgtgtatacgggtataattcgaattgaggtaatgtctgtttgtcgagtcgaagcgataccatgaaaccttcgttccagggaccgtgacgttcgcttttatgatcgaaaagcagatttcccaagccatagaaaataggttttccgtggtatatttcatatcccgaataacaatgctggtggtggttgattattgcgtcggcgccggcatctataaaaaaacgataagtttctttcatgcggggagatggcaacgcgtaatgttcgtgtcctccatgcacgatgaccaaaacataatcggcttttgtccgtgcctcttgtatattgtaatattgttgtatcggatttaatggattggcgccggcggttgtggccgttgctatagagaactcatgttcacaacaattcacgatcgctaatgttcccttctctttttgatttatgtacagaacagttgctgcttcagccgaattcttaccgatgccgactgtctttattccggcgttttcaagcagttcgcgggtttcaatacagcattttgtaccttggtcgaggatgtggttgttggcgagtgtgcaaacattgaaaccggcatacttgacggcatcgactgcggcgggctgcccttgtaatgtgggaccgcttttggtaattggaactcctgcgtgcaaaacgattgggaattcgaaatttatgatactgacatctgcctgctccgtgaggtatttaatgtcgtcgaacaacgaagcgtagttgccacgggcgataagatctgatattcggtatctatcgcaaaaatcgcctgctatcagaacattcataagcgagctgttattttgttgattattctattggcacaatatgctgtcgttatacctgttacaataatcaatgtatagcgcaggtaattaccgtaattcaaatggtcaagtgtggtttcccagggtaataaaccgatcaataatatcatacaaccattggtcaaataggattctaacgagatttgccccataaaagtacatatccgtttgatccatacgctttttttgatgaagaagtacgatacgagcataatcggatatatctccaaccattcccagaacgtatttgccggaaagataatttttatgacgagaaaacagcctgctattattcctgtcaatttcaaaagattgactttcttgccttttagaatactgggagccatataatatcctatgagataggaaggaattcgttgcagtacgaaagcagtattattccatacatgcgaaaacaaattgttgttttcgattttgatggtactgattaacagtaagatgatgcataaagtcacggttagcagagtttgatattttgttttatctattattcgggcataaaagggagttaagaaatatagcggaatcaacatggcgatataccaaaaacctttgtgctccaaccaatagttcaatgtggaaaggcggtataaaaatatagaaatggaaaaatgtccgtcgtttacacaacccaataccaggtagtaggggaagcaaatgagtagataaggtagtaaaatgtgcctgtatctttttgcataccaccgaattacccccccccnnnnnnnnnnnnnnnnnnnnnnnnnnnnnnnnnnnnnnnnnnnnnnnnnnnnnnnnnnnnnnnnnnnnnnnnnnnnnnnnnnnnnnnnnnnnnnnnnnnnnnnnnnnnnnnnnnnnnnnnnnnnnnnnnnnnnnnnnnnnnnncctcggttgccggtgattatgatccatcgcagtatgtcgttcggacaatgtatggcgggaggtaataaggagtggcataataggatgagtacggtggctactcccattaactctctgcggtattgagtgaaaatacctaatgatacatacatactggggcgcttgttattatgttttgatcttgaaatagtgttcgatatttataaggaacttaggggtgtttggaagtattttatatattgtatttttaattatatagtctatcaatatacaggaaacgaatacacttaatataataagagaggagtatcccaaatattcgaatattcccgcattccataatttatctgttcttagaatgtctgtccaaaaccatttgaataagcaagtatgttcgcttataagatagacagctagggtatgtgccgataatttatttatgaagtttgatttgaaagttagatgttttattcctaagaatagataaacggaacttatcataactggtacactcgacatctgtttggggtatagcgatgcaaaatcagtataattccatcgaagggccaataaagagaggctgtacataccaaaggcaaccgttatcgatgttataaaattcaataggttgtttttgaattcgattcgaatgcattcttttttaattgcataggctatcaaatacaataggataaatctgaaaatattaaatccgaatggatctgttacgataaatatcgttggaataacggatacggctatgaatagacttatgcatagaaaacgtatctgttttttcgagcaggcattcaatacgtagttgagaaatgggtgtaaaaatagtaaaaatacataaggggtcagaaaccaatatcgtttaaagatgataggcattgcatttttgatgatgtcggtatatgatgccatgccaataatgaaaagtaataaagcaatgcttaatgaataaaatgtgatttgtttggataaattgaatattcgggtaatgctgaattctttgtctattagaaaccatgcgcctattagtacaaaacatgctactccaatttgggcgaaatttccgaggaaataagctgctgctatattgctaccacttgctgctgatcctccatgccaaacataatgaacagcgactatggacagcatgcagaatatgcggagcaactcgaaattacttgaacggacggtgggggggggaaattcggggattgcatcattgataaaaaattattgtcaataaaattatatatttatagcaggctttttatgcgggatatgatataatctaccggaggtacaaagaggaaggtaataagaaatataggtatcaaaagcaggaaaaacaacagagtcccgttgattgtatatccgtagtgcaccaatagaagctgaatgccccacggaaaaatgaatgttccgataaaatttgtgaaatatacggaaaaagaaactttcccaatctgttctattttttttgtaatataattgcgcgtttggttgtttacagtttcccccccccttatttcttcagattttcgttgtacgtataggaataaataaaagaaagaccagccgatgatagatggtataagcgcatagatccaataatgtaatctcaatgcataccatagtaagttcccgataagtccaaggcagataaagcagagcagcaggttatttttagacagttttgtatttttcagataatagtttagcgttacaccgatcagcatacagggaagttgatttatgatgctgtagtaagtgaaactacctggtttagatagagtccagtcgccgataatgaagaaaataccggtttgaaaaatagcagaaacgatgactccacctaatggcagcaggaagagtagtcggggattatatgttttgatgtatcgatataatttataaattaacgggaacaaaagataaaataaaaatatggttccgataaaccatccgcccgggacgatgttgttgaaagcttggtagtccaatccattcagtaagaagatatttgcaagaatacttaatggattatgcgatattttgtagaatggctctacattgaatgtagctatgtagtaagagataatttgatagaacagaatgaataaaatataaattggtgctatgctcaaatatctttttttgagaaacgttttataagtggttctatttttttctgtagagttttcgtatttagccaataatcgttcccaggatttgactgcgagaaaacctgaaatgacgaagaataactggcatccgaaagcacctgcatgtaaaaattccctaattaagggatttatttctttaattagttggggtgcatgtactaaaataacccccaatatggccaagccttttaggaatgtgatgtattgcaggtttcctacgtgcttcatattttagaatagattaagaagtttgttcgtttcgaaatgcataaagaagacatcatccaaagttgtttccgattcccaaagtagcattagtaataatagtgaacttgcataggcgatactgaatagtcgtggtttgataatttttcgagatactccgatttggttcgctatataaatgtaattgaatatgatgagaatgaaaaaaagccgactgaagtttacggcaaaaaattgaggtaccagcacaaggctgaaaatgatattcagtttgagaattttgtgattgaagacagaacgtagtgatttctgtttcggactactgatttcttggttgttggaatgcctgctgtagtagtataataccgggaaaattatgaataggtatttgacggtgttatacaatgcgcctgtcatattggcataatgtccggtcatatatttgtcgattgttgcttcgcgtataagaaaatgtgaatatatgcggaataatagattgtcactaaatatagaaaccatatagataataacgatgattaggagaacaagcttgattccgttttttctgttgatgaggatccataatggaatgaaaaatagtagaacccagtatgcgctgtggaacaaagctgcgagtgcgatcaggccagctgaaaataaatattctttcgtcgatcttgctcggacaagaagtaatatggcgattattgctatgatcaaagccattgaattacgtaataggcaggcatcgaacatcgctgagaaaataaggtaagaactccatactgcattcggatgtaccgtcagttttcttatgattattgataaggcggaacaaaataaaatacccgcgatatatctgaattctatataactacatccaagttttccgcaaatatcatttaaccagacatatcctatttcataggaaacatcataaccttgttttacagtattgtagatgtcttcataattgtaaaagtctaaaggatcttgactacctccaaaaagagcgcatacgatgacgcattgcagaatatttattccgatgttcttcgtgaacagatatcccgacaggatgattatcaacaggaacagataggctccttccataaattatcggttaagattgttgagtatctgattgattttactcggattcccatagatgcagggtgaatcgtaaggacggtcgggaaatgcaccgtattccaatttgattttcaaaccatgttcttggatgaattgttctacgcgctcggccaggcttatgggctgacctgtgcagcaatttatgataccggtaacttcgcgttgcataatgacggcactgattatttccgccaacttgtccacggtaataaagtcgtatttgttttttcccgtagtgaatggaaatgtttctcttccttcttcgtccgcgaggagtaacttgcagaaaatggagttgttctttttatcatcgccgagaatataatatccccgtagccactgtaaaatacagcctttttgctgggcgtattgcatcatacaacggcggagagcatctttggcgatgccatacatggaaagagggttgcagggtgtattttcgtcaattgccccttcccagtagcctatttcgtgcattgttcccataacagcgagctgaggtaatccgtcatcgattattcgagtaaggaatcggtaatgggccgatagatctcccaggtgagttgaggcattgtgtacgaatccattgcgccaagccagatgtagacatacgtccggggttcctaataatgtatatatgtttgtatcgggaagggtgaaaaggtcgatgtttttccgttcggcgcgtttgtctacttcgtcggtattaagatcacatgctatgacttggattcctttatcaagtaatgtttttactatatgaagacctatatatccgttggctccggttactaatattttcattttgaaggaagattaaaatgtgtcaataaattgattataagtaattttcgatgaaattaagtaactcgatcggggacattttttctttataatgataatttatatcgatcgggtctttgatttttttgaggaaatcggagtcaatatcgtttggagaggtgaatgtagagatatattccagattgaaaaacggttcatttttgatatgcgggttgttggtcaaaagtttttttccaaggcagaccgcttcgcaagctctttgtgtaaagccgatgccatttttttgcattacttccaagatacaatgggtgtggaagatgtattgcaagttttcttcataagggatcgacttatttagggacagtcgcgaaataggcttaaaattataacaaattgattgtcaatgtgataaaaatttcatatcttagctacagtattgcaacgcaggatcgacctccggcgtgcaggtgaccgaggcagtcttgacatcgccctcgacggtcgtccagcgaagtgtcaatgtatgctctttttcgagcgtcggggcgctggtgaaaacaatcacgggatataatgtatcagtggaaaaatcgttgacttcacaacagtaaatcatttccatatccgcaggcgtcagctccgacattaactttttaattacagacaaatacttccttttggatagaaacgtattgtcgtttttcccgggatatccttcgtgaataaaattggcataggaataaagtcgcacaagtagaatatcatccagcagactaccggcaggatgctcttcgtcccaatcggcattactcacaacatgcagctctcggaaattattagcaaaagcaggggtgcgaagacagagatggtccggaacccattgattgaatgacgtatcatcgttgcgtgttgctaatcgcagaaactcttccggatcggagaacgaatcacacatgttattgtgtgagtaattcggagttatgacaaatcctgtttgtaaattttgtggcggaacggtaggttgtgttccaaaatacccggtttggagcattggtaattctaaacctccgctgtaataaacttcgataaagcattgtcgaaatgaaggggcagaagatgtttcgtgttcgttacatccgcagcacaacgggattatcaataacaggcagattatttttccaatattcataatactaacgtataagtaaatatacttaaatctttgtaatatctagaagctggagtaccggcatccgaatcttccggcataaccggacctttgctcaaatcgaatattccatcgtaataatatccgtctgcaactccttcccacccgaaattgcaatggacaagagtttgtccgaaaggtcctctttgagaaacagtaccattacggtaatatgtttttatgtatcttgtacgatagagccatccatccaaattccaaaaatgtgcctttttttcgccattctctatatgaactcccctcataatggttgctttttgttggtcatgtaacatatttcgcacacaactgttcttatatgtttcgtaagtgacatttttggagggcatacggattaaaaaaccttgtaaatcataagcatatgccatgctctcttccaagccatattcagtgtcaatatctattcccacagcagcgattagcatagccactgcgtaaccttcaggacttggcattccatttattcctgaagatacaagttttggactcaatatggttcgtcttatcaaagtccaatcgatcgcagtttttcctattgatttcggagcgtatccataattccaataattcgataccattacttgtgcggcagcaatggctccgcaaccagcaacaggagattgtccatggaccaaaggacaacaaacattatacggtgccccctgcccccattttaccggaatcagcggtcctatcctttcttgaacaacgaacggagtgtattcctctcttaaaacattgcctcctaaatcccccgtgtgacgcccgtcgtcgctcataggtgcgactcctccatcagcatctatatcggcattttcgattccaatgatcgcggcctgtgcaaccatttgcagggggaataccaattcaccgtccgcttcggcctgctcgggagtaaccgttacggcataccggaaatcttcggtcgtgaggcttccttcatcgacaaccgcatagaccggctccaaccggtcgtcggcccccagaatggcatagcccgcctcgttctcgaaattgacgatgtagagcagatcctccacgtcggccgtggcttcgctgcgggtgacagcgccatcttccgcgggagtatcgatctcttcgaggacggattgcaactcttcgagagcctgttcgacagggactgcatgcggattttcagcagtcggagggttttcaccgaaaggccccggctccgcgcccggatcggccgtacagccagccacagtcagaacccgaaaaatagcgaaaaaagtccgaaatgtttcataacggattaatttcagggttttcggtcgaaccctgttccgagagttctgaaaattcccggaacagggccggaagaagttttcctcctgatccgaaattaaacatttctttgttgattaccaaataaaatacaattttatttgcaatcaaataaaacaaaccgcattcgggcttcgtcgcgcacgtcgcggtggaagatgcccttgacagtcgccgccgtatcttcccggccccgttatttcgcactgccgtaatgccaggtgaccgcctgccggatgtcgggatggagcgatttgccgacgggacaggtttcggccgcgccttgcaggattttcttgtctttgtcgctgtaatcgcccggcaggtagaaatcgagccggatctcggcgatgcggcgcggttcggcggccatgactttctggatctccacacgcgttcccttcaggtcgatttcgagccgacgagcggctatccccatcagggtcagcatacaacttcccagagctgcagcaaccatgtccgtcggagagatgtattcgcctttgccgttgttgtcggtcggagcgtcagtgataacccggttaccggactggacgtgcgtgatttcggtccgcagatcgcccagatacaaagtttgaatcgtagccatttcctaaaatttttaagtgaatgtttcctgataaagatagtgaaatgtgagggcaatcgtgcggacttgcacccaaaagattgccaaaccgaatcctatcttctgcaaagatagggaaagccgagagaaaaatggaaacttgggcccagttttccgaggcgcatcctatctaagactatgtcaaagatggggaaaagtgagtgacaagccaaacttgatcagcatttctcctccttgcgcggcgaaatccacgagagccttctgcatccgctccgatcgtcggtcggtcgagccagcccgagccgcatcttgtaaaaccatcgtttttcggaaagtccggaagacaggtccgccatacctgaaattccgttccgcccgttccgcgtcctctccgatccgggcagcgacggacagcggcacgcccggaccggatatttgcccggaccgggagaccgaaagcgaaataaatttcgtacatttgtcctccataaggacttatgctcgaaaaactcgcaaaacagaccgccatatacggcatcagtacgatcgtcgtacgattcctgaactacctgctgacaccctatttcacccgggtgttcgacccgggcatttacgggatcaccgtggacgtatatgccctgattccattcgctctcgtgatcctgacgatgggaatggagtcgggatacttccgttttgcagccaaagccgacgaagcgggcggcgacgtgacggccgccaaacggcgattgttcgctaccacatggggcatcacttccctggcagccctgctttttttcgggctggtaaccctcttccgcacgacggtttccgagtggatgggagcggattacgccgcaaaccccgacttcgtagtatgggtcgcggcgatcattttcctcgacgtttgcacggcgattccctttgcacgcctgcgggaacagggacgggccctgacctatgtcgggttcaaggccttcagcgtcgtaattacggtagttttggcagtggccttcggtcttgccggcttttacgaaacatcgttcggcgtaggctgggtcttcgtgggcaacctgatcgccagcctgctcaccctattggcaattctcaccacgacgaaccgcactctgccccgtatcgacggcaagttgctgcggcgggtgctcgtctattcactgccgctgatggtcagcggcatcgcaggcacggccaacgaattcatatacccccagatgatcaagtacctcgtaccggaaggtgcgatgggcgaagtgggtatttacggagcgatcgtcaaaatcggtatggtgctcatgcttttcgtgcagatgtaccggttggccgccgaacccttcttcctggccgattataaaaaatcggactttttgcagatgaatgccgcagcacttaaatactacgtgctggtgtcgatgttcatattcctgggaatcgcttttttccgggatcttttcggactcatcgtcggcaaggatttccgcgaaggaatcggcattttaccggtggtgttgggtgcgaacgtcctcaacggcgtatggctcaatctgtcgttctggtacaaacgggaggagcgaacctcgctggctatcgtggttacctttgtgggcctgatatttacgatcggatgcagcctctcatttattccccgctggggatactacggagcagcctgggctcgtttagtcagcgaagcggcgatggttgcggtaagtttttggctcaaccgccgtttttatcccatgccttaccagaccggacggattttgggatatgtggcgttggcgctggttctatacggcgtgagtgtcgtcgtggatgaccatgtcgctccggctgtacccagatatgcttgctacgcggccttgttgctgctctacttttactatgccgtgcggcgggagaagatcgaccttcgggcactggtccgttccgcaatgcaccggggcataaataacaacgaaagatgagtgaaaaattgattatattgctgctcagcggcacgctgctcatgaccggagtcatggccctttcgtgggaacccggccgcgatcgcacgctgacgctgggactggttctggtggcgatgctatgcatcgcggtccggcagcggctccggcggatgcagcggaacagggagtaaaatgcggttttcggaggtcatcggtcagcgggagttgaaacgtcatctggtgcgcggggtcgatgccggacgggtgagccacgcccagctcttcacgggacgtcccggagccggggctcttccgctggcattggcttatgtacagtacctcaactgtacgaaccgccgcgacggtgattcgtgcggcgaatgtcccaactgccggcagatcgccggtctggcgcaccccgacctgcacttcgtcttcccggtcaataaacagggtaaaaaatcgggagaagcggttttgagcgacgacttcatgccgctctggcggcaggtcgtcagcgagcgaaacggttatttctcgccgcaggagtggtacgaccgcctcgacctgggccggacactcaaaggggcgatttcggcccgcgaagccgacggtatcatccgcaagctctcgttcaagagctttgccgccgagtacaagtgcgtgatcgtatggcttccggaaacgatgaacgaggaggcggccaacaagattctgaaaattctcgaagagccgtgggaaaagacgctcttcgtgctggtgagcgagcgtcccgacttgttgctgcccacgattctgtcacgaacgcaggaggtggtcgtaccccggctgaccgatgaagaggttcgtgcggagctcgaacgccgaggggagcgcgatccggagaaaattcgtacctttacccggctggctgcgggcgacctgatcgaactggagcatctgctgcgcggcgaagggaacgaactccgcaaagacgatttcgaatttttctgttcgctcatgcggttgagctacaacgacaagcacctcgaactgatggcctgggccgaagaggtggcccaactttcgcgggagcagcagcgggctttcctgaccgatgcggtgcgtcttttgcgggagagctacctgctgcatgcgggactgggcgaaatctcctgcctgtggggtgaggaggcgaagttctgccgcaatttcgctccgttcatcggaaaccagaacatcgaatcgctggtcgcggaggccgaatcggcgatggcccagatccggcaaaacgggaacccgaccatcgtgttcacccatttcgcattgagcgtgagtaagatgattaaaaaattgtaattatggcaagagcgatcatactgaccggaggaaacgtgggcgacgtaaagacccgcctgcaaaacgcacagcggctgatcaaccagcacgccggacccgtcatgcgctgttcgcaccgttacaagagccgagcatggggtttcgatgccgaagaggagttttccaaccaggtcctcgaggtggataccgacctgacgcccgaacagttgctcgacgctttacaggcgatcgagcgggaactggggcgcgaccgcgaggcagaacagtcgctcaaacaaaggaccggtgcccgatatacgtcgcgcccgatcgacatcgacatactcttctacgacgaccgcgtgattcgcaccgagcggctgaccgttccccatccgttgatccaggagcgcgaattcgtgctcgtccccctgtgcgaatggatgcgcgactaccgccatccggtgttggggaaaacggtcggagagctgctcgaagagctgaaaaatcggaatgaaacccatgaaaaagcataagttcaagatactgactttcgtcgcggtggccgcagccctggcggggacgggatgtttcaagtcgatcggttacgaaacattctacgtgctccggccttgggcgcaggaaggtaccgtcaagacccccatcccccgggaagatatgctggcctatgccttcgacgcggacacaaccgaatggagcgtgctctcttacgaggacgccgtggccggaataatcacctcccggagaaccggcgagaagctgcggccgatcgcccagggcgagccgtacgagatcgacggcaacgaaaactggctggcgatgcagctcaacggcccccggtttctcatcctggccgtggaccagtcgaatcggctttacggattcaccgagcaggccatcggggagaatcttccgcagatgcacgtgagcgtaaccttttacccgaaagaaaaaggcaaacgtttcctgaagggcaagtggatcatgtgcaacgacttttatacggaacccgagccggaaccggatcctgatcctgaaaatcccgacacgcccgataacccggacaatccgaacaatccgggaacggaagacccgaatcccgacgatcccggtacgcctgacgacccggataccccggacacaccagctccggacgatcccgatacgcccgaaaatcccgacaccccggaaaacccggatgtgcccgataatccgaatccggacactcccgacgaaccggcagtttccggcgcccgctcgtccttgtttcgataacagaaaaacgatatgaaacgacaaaaccataaagcgatcgtctggcttcgggtctgcgtccttgcgatgttctgcccggcgttcctgtggcgctgcgcgaccgtcatgaacctcgaaggcggcccgatcgacacccttcccccggtgatcgtgtcgatgttgccggacaacttcacgaccaacttcaccgccaggaagatttacgtcactttcgacgaattcgtgcagctcaaggaccagcaaaaagagtttttcacgtcgccccagatgaagaagaaaccccagctttcgatccggggccggggcatcctgatccagatcaaggatacgctcaaggagaacacgacctacgcgctgaatttcggcagtgccgtgcgcgacaacaacgagggcaatccgctctactcgatgcgttacgtcttctcgaccggcccggaggtggattcgatggtcgtttcgggatatacggccgacagctacacggccgacagcgtagccaaaagtttcatttgcttctttccggccgattcggtggaggatgttcccgaatacgactcgacgatgttcaaataccagcctgcggtgatcgcccgtgcggaaaccaacggtattttcatcgcccagaacctcaagccgattccctaccgggtctatgccttcgaagataagaacaacaaccagatttacgaaccttcggtcgatcaggtaggctttctcacgggaacgtacaaccccgctgagctgcccgacttcggcatctggtacgactcgatccgccgctacgtgacggccgacccgcagctttacttccgaatgtttaccgacgaggctttcggtcggcaatacctgcgcgaatcggaacgtccggtgcagcacaaggcgctcctctatttcaatgcgggccatccccggatcgacagcatcgtgttcgacagcatccctgccgaccgcgtaatcattgagcctcaatcacgcaaccgcgatacgatcgcgttgtggttcgacgttccttcggccagtctgcccgataccatccggggagaaattacctacatgaagcacgactccctcgaccggctgcttccctcgaccgagaagttgaaactggcctggcggtatatcgaatcgaaagaggaggccaaagagcgagagcagctcgaaaaggagaaagagaagacactggctgccggcgaagagtgggtcgaaccggagaagccgagtacgtttacctacaagttttccacgaccggttccgttacccccgaaaccaagctgtacgtcgaattcgactacccgctggtccggttcgactcggctgccgtcgtgctgacagaacagatggagaaggaggaaccgcgtccgatccggatccgatggcagcaggatacggccaacatgcggcgctggtggctggatgttccctggcaattgaaaaacaattatgccctgaccatccccaaaggagcgttggcagatgtggcggagcagcaaaacgattcgatcgcagtcaattacacgggtgtcgatcccgagaaattcgctacgttcatcgtcaatgtggtcggtaaaagcgacgaggcgagctacatcgtgcagttgctgaacgaatcgggaaaactccttcaggaaaaaaccggcgtgcacagcggagtatgccgtttcaattacgtaccggccggcaacgtgaagttccgcatcatcgaggacatgaacgataacggtcgctgggacacgggcaatctggtggaacggcggcagcccgagcgggccgaatactatatggacgataaaaacatcgataccttcgcggcgaaggagaactgggaagtggagcttactatcgatatgaacaaggtattcgcgccggtaacgatgcaatccctcgccgagctgctcgaaaaacgcgaagccctgcgcttgcaaaaggtgctggaagagcgggccaagaatcccaggcggaacaccaacagcaatacctcgaacacgacgagcaccatgggcggaggattcaacagcggtatgaacacgatgatgaacggattgagatgatgaggcgtttaggaatgatatgcctgttcctcggagcggtgctgtgcggcggcacagcggcggcacagcatacgctgggcgtaacgggcggttacggctacggcaatgcccggttttatcccgaccaggaaacccgggcggtctggggatgctacacggcgggcgtaacgtggcgctattacggaccccagcgtttcgtaggcggtttcggcatcgatttcgaatatctgcaacggggattctcgtttcttcagaatccgaccgaagaggacccggccaaataccaatggtacacgcgccgcgtcaagtcgctgatgctgccgatcgtctggcagccgcacatctacctgttcaaaaaccggatgcgcgtctatctcgatgcggcggtctttttctcctacaacatctcctcgacattcatcaacgaacaaggttcgacggtatctccggagcagtccaaaggtccttggcggggagaatatgatttcaaagtggtccgcgacaaccggtgggggtacggtctggcgggcggcggcggtgtcgccgtactggtgaagcaactggagttcagcgttcgggtgcgttactacttcggctattcggacctgctgcgcaatcacaacaagtatgcgggaaatacgacggacggctacgaaaatccattctatactaccccccagcgatccccgctcgataacctgaccttcagcatcggcgtcagctaccgtttcaacaagtccggtttcacggagtggaacaaccgtccgcccaagcgggacaagaacaaggaggttttcaattacaaaggagtcacaaaataaccgaaatatggaaactacacgccagcaaaagatcgccaaacagattcagcgcgacatggccgaaatcttccagaaggagggggccgaaatcgtacggggagtgctcgtgacggtaaccgccgtgcgggtttcgcccgatttttcatacgccaagatctacgtcagcgtctttcccttcgaacagaatgccgctgtcatggccacgctggagcagcacaattggttcctgcgccgggcattgggtcagcggattcggaaccagctcaagacggtccccgaaatccagttcttcctggacgattcgctggagtacatcgagcagatcgaccgggcgatgcaccgcgaggagtaacctgcgatccgccgaaggccgatgctcacccgattctttgcccgccgctatctattttcaccgaaatcccgttcggtgatcaacgttattgcgggtgtgagcgttctttcgttcgccatgcccgttgcggcgatgatcgtgctgctgtccgtgctgaacggtttcggagatttcgccaagtccatgtcttcggccttcgatgccgatctgaccgttgccccccgtgaagggcagaccttcgcatctgcggaaatcgacagtctggcgctgacccgcgtgaaaggggtcggggtcgtttcgtacctgctcgaacagcaggttttgctcgaacgggacggtttgcagacgatggccacgttgcgaggcgtggacgaccgttatacagaagtgttcccgatcgaggaaacgatcccgctgggcagttggagcgttcgcacgggcgatctcgaccgactggtgctgggacgcgacatggcccgcacgctcggaatccggtctttggtccgtgccgaagtcgccgtctatgccctgcggcgcggcagtttctcgtcgttgcttcccgtcgatggatattcggtgcggcggctcgacgtcggaggactcttctttctcgatttggaaagcgagaatgaatacgcacttacctccctgcgtgcagcccaggaacttttcgatcgtccgggacgcatatcggcgatctcggtgcgcgtagccgacggtgcggacgcggaaaaggtccggcgtgaaatcgccggaatcgtcggcgacgatttcacggtgcgcacccgcgacgagatgaacgccctcttcttccgactggttgcctacgagaaatggggcgttttcttcatttcgctgctggtcctggtgctcgcctcgttctcggtagtcgggaccctcgtgatgctgatgatcgagaaacgggacgatgtggccacgctgcgtgccctgggcgccgatacgaagctcattcgttcgatcttcgtcggcgaaggactcctgatcggcggtctgggggcgtcgataggagccgtgctgggcgtaggcttctgcctggcacagcaacatttcggaatgattcgcatcccggtcgatacgttgttgttatacagctatcccgtagagatgcgctggagcgatttgctgatcgttgcggcggctttcggggcggtaattctggcgatttcggagctgaccgtgcggagtgtgatgaaaaacaacaaactatgatatgaaacgattgatccgtctgttttgtctgatcgcggcggcaaccgccctcggttcctgcgcccgggacaaggtgatccccgacgaggagctggcccggattttccgggatgcctacctcatcaacgcctacgtttcggaccggggagtgaagctcgactcgctcgaactttacgaaccggttttcagccgttacggttacacggccgaagatgtccgctatactatcggcaacttctcacggcgcaaaagcgccaagctgagcgacgtggtcgaacaatccatccggctgctcgaagaggagagcgcctactacaagtacgaagtcggcgtactcgatacgatcgacaacgtggcccgtcgccgtttcacccgcacggtctattccgactcgctgatccgggtcacccggatcaaggacaccgcacggcttcgggttcggattcccgacacacgtcccggcgaataccgtgtgtcgttcgactacctgatcgactcgctcgatgagaacctcgcgccccgtatgcgggtatggctggtggaggccgacagttcccgcaagggcgaatcctcctcgatcctgcggaagtcgagccgggagcgtgtttcccggatactccaggcggacagttcggcccgttcgctcgtactctccctgtacgggacccgcgaaaagttcaggcgtcccgacgtgacgatatacgacctgaaagtatcctatacgcccgaaaccgcagaggccgtggacagcctctacatcgaccagttgggtcttaaaatcttcgccgatgaattcttctccgtcttttcgccggatagcctccaactacctcttcacggggaggcatctcgttaaacacccgctggtgacggttcgggccgacggacgcatcgaatccgtcgaaacgtgcgccgcgccggacggcagacccggtgtcgaattttacgcgggagtcttggttccgggacttatcaatgtccattgccacctggaactctcctacctgcggggcgctattgcccaggacggcggcttcgccgctttcgcccggtcgatgggccgggtgcggggacagttcagcgaacaggagcgggctgcggccatcgctgcggccgacgcccggatgtgggcggaggggatgcaggccgtaggcgatgtagccaacggagattcggcctttgccgtaaaagcccgcagccgcctgtcgtaccgtactttcgccgaagtcttcgggctgcataccgactcgacggacgaacagcggcgtctgctccgctatcccgaaacttcgctgacccctcactcgatctactccgtgcaggatgcccttttccgggagatctgcgcggagggcgacgaaccgctttcgatccatttcatggaaacgccggctgaagccgaactcttcgaacagcgcggcgagttgtgggagtggtaccgaaaggcgggttttacgtgcgatttcctgcattacggctctccggcaaggcggatcgtggagagcgttccggccgaccggagcgttattctgattcacaactgctgcgtgaatcagcaagatatcgatttgataatgaatcatttcacggctccggtctggtggtgcctgtgtcccggctcgaatcgttacatttcgcggctggttcccccggtggaattgttgcgccgcaacgggctgaatatctgcctcggaaccgattcgctggcgtccaatacggcgctttcgctgctcggcgagatgcagcatctcgggaagatacctcttgcggaactcctgacctgggccgcaccgaacggagcgcgtgcactgggtttttccgagctgggcgaggtcgctgcgggcaaacggccagggctggcggtgctgtccggactggattacgactcgatgacgctcacgcccgcatcgtgcatcgcacggattctctgatcgggcgaatgcaggcctctatttccgtcggcaaacgctccgaatcagaccgggaaaaggagcgactcccgaaaaaagacaataacgataagggacggaattcctccgtcccttatcgttactgttcccgtcgattacagcggcaggtacttttcgaccgtatcgcgcaggtgatcgccctcgagatgggtgtagatttcggtggtcaggatgctctcgtgccccagcatctcctgcacctgacggatcgaagcgcccccttcgagcagatgcgtagcgaacgaatgacggaaggtgtggggactgatgtgcttgtcgattccggcccggtgaacggcttcgcgcaggatcgtgaagaccatcacacgggtaagctgcgtcccccggttgttgaggaacacgacgtccgatgcggacgttttagtcgcccgatcgtcgaggtaacgctgaatcttttcacgagccgccccgctgaccggtacgaggcgctgtttgtcgcccttgcccgtcacgcggatatacccttctccgaagaaaaggtcgcccaaccgcagcgaggtgagctccgaaacgcgcagcccgcacgaatagaggacttcgagcatcgcgctgtcccgccgtcccttgaccgtagaggtatctacggcggcaacgatgcgatcgatctcttcgaccgtaagaatatccggaaggtgacggccgaatttgggcgtatcgatgaactgggtcggggtagaatcgatcacgtcggtcagcatcaggtaattgtaaaagctgcggataccgctcaacgcccgtgcctgcgaggttttctcccgtccttgatcgtacaagagggccaggtagcgctcgatcatcggagcttcgaccttgcggggcggcacgtcgtagaaccggaggatgaagtgggcgaactgacgcagatcgcgcatgtaggattcgacggtattctccgagagccgtttttccagtttgatataaacgcggtaactacggctgatttcttcccattttttgagagtttctgccatttttatttatctttgtagaagataggatacgcctcggaaaactgcgagcaagctcccgttttcttctcggctttcaaagataagacgcagctcggacaagctcgaacgaccgacgcccgaagcatacgcagaggacacttgtgaactctgcctgcaaggaggagggaaacagaaagttaagtttggcttgccgcttgcctatcattatctttgcagaagataaacttcgccccggcaaagtccgcataaattcggcactgcgcccggcccaattgtcttctcagaggcgaagatacaaaaaaattttacataatattatttcgaaagactttttgccggttctttcgaccgaaaaacgatataccgatatggattatgtggagttgaacgtccgggtcacggatcccgagttggccgaaattctgacggccgaattagccgagctgccctatgagagcttccagacggagggcgaggtgctgaaagcctacatcccccgcgagcggctggcggactgcatgcagcaaaccgacgacctgctggcccgctacggcatcgccgaccggcgttatatcgccatcgagtcccagaactggaacgccttgtgggaacagaatttcacgccggtcgatgtcgatggacgcatcctgatccgggcgccgttccacgcatcgcaacccggatacgaactggaagtggtcgtcatgccccgcatggctttcggctcgggacaccacgcaacgacctgcctggtcgcgtcggcgctctgcgatctttcgctgacaggaaaacgcggactcgacatgggctgcggtacgggcgtactggccatcgtggccgccaaacggggtgccgcgacggtcgatgccgtcgatatcgacgagtgggccgaggccaactgccgcgaaaacgcggcggcgaacggactggcggagcggatcgctccgatgctgggcgatgtaagccgcatcgcgggccggaagtacgatttcatcgcggccaacatcaaccgcaatatcctcacgatggacatgccggcctatgccgaggcgctcgatacgggcggcgatctgctgatgagcggattcctggaggaggatgtaccggtcatcgaggctcgggctcgggctcgggcctgcgggctggagccggtcgaagtgcgtaggcgcgacggctgggcgatggtgcacgtaaagaaagcgtgaggtgccgggaacgctcaagacatacaaggcgcggggaatcgtgctcaattcgctcaagtacggcgacagcgcgatggtcgtgcacctgctgaccgacgcgttggggcgtcagagttacatggtgcagggtgtccgcagcagtcggggacggggttcgaaactggcgttgttccagccgatgttcgccctcgaattcgaagggctgacctcttcgcggcagcagatgcaccgttttcgggaggtgcagagcggaatcgtcctgcaacgaatgcctttcgacgtgaggcgctcgacgatcgccctgttcatggcagaggttttgtaccgtcttgtcaaggagagcgagcctgacagccagttgttcgatttcgtgtgggagagtatcggggcgctggacagtatggaagagggcgtggccaatttccacctctggtttctggtgaatctgagccgtttcctgggattttatccgggaaacgaatatatgcccggcgcctggttcgatgcctgcgaaggatcgtacaccgtgcaaaagccgccgcatgcgacggtaatgaccccggagaacgctcgtctaatgaacgacttcgtggagtgcgacgtacgttgcctggccgaaataggactcaaccgtacacagcggagcgcttttctggaggctttgctggcctactacggttaccacctggacgcgatccacgccgtgcagtcggtccgtattctgcaagaggtgttctgaccgggaaaccgacatcagaggacaacggacttttccggcaggcgacgacgcagagcgcttctccggtgtaccgggtgcggaagcaaaggcgaaccggaagttttgccgggtactgaaaaacgaaagaaaacagttcaatgttatgaaacgaattttctacagcctgcttttcgcaggcaccgtatggacggctgcaagtcagaatccgcccgaaatcaaaactccggaccggaaagcggccgaacggatcgaggagtattatctgtcgaagatgcttccggattcgatgtagctcaaagcaccctccctctatccggcggactatttcagcccttcgaccaccatgacgccggtgatttcgatgagttcgctcatggagatccggaccaaatacgcgttgcgccgcatagatatcgttccctataaagtgcgcagcggctggttctcgatttccaacggccaggcccagaactggagtccctatctggacgggcatctcgacgcccggaccctctcgtttcccgtaccacggtaacgaccccgatcttgcgttgtgcggctggtcatcgaggacgaccgtaccgattttcaaaccgacattccgtttcccggagcgaatctgctccgggaaattttcgtttccaactcccgcatccgcaaatttgggtatttatgcgtaacggattccggcaaaaaaatcgcttctttgcacacttgttaatgtgtagtttatgaagaaaagtttgattcgacaacttaaaagcgaagactgggtgatcgtcggggccggcgcagcgattctcctgctcgccctgctgtttccccgctggatgcctgcgatgcccaaagacctctcctccgccggaaattggatgagcgccggagcgatgttcctcttcctgctggttttgacgggtgtctgtcagcggatattgggccgtccgctgcgtcgtttcgccgtttcgctgctcgccattttcggcgtggctctgctgtcgcaagccgtggcttcgatccccgcaattaaacgactgggcttcgaggcggttttcttttcggtgatcttcggcctggtcatcagtaactttttccgggtgcccgagtggttgaaaccggcgatccagagcgagttttacatcaagatcggtatcgtctgcctgggtgcgacgatcctcttcggcgaagtgctccaatcgggcgtttacgcgctgatccaggctttcatcgtcgtctttacggtgtggtacttcgccttctggctggcccggcggatgcgtgtggacgaggaaacctcgacgatgctcgccagctcggtcagcatctgcggcgtttcggccgccatcgccacctgcggcgtaatccggggcgacaacaagaaactctcctacatcatttcgctggtgctggtctgcgccgtgccgatgatgtacgtgatgccctggctggccggtctgctgctgccgactgtggtggcgaaccccgaaaccgtgcaggaagtcgcaggcgcctggatgggcggaacgatcgatacgacgggtgcggtcgtagcgtcgggtgctctgctgggtgaaacggccgaacagacggccatcatcgtcaagtcgtcgcagaacgtcctgctgggtatcgcggcgttcgtcatttcgctgtattggtcttacaagggacagaagaaacgtcagcgccccagcgtgcgggtgatctgggagcgcttcccgaaattcgtggtgggtttcgtcgcggtatcgctcctcttcagcctcttcttcgccggcaacgaagccgcgccggcccgcacttcggccaagatgttcagcaatacgctcttcaacatcgcgttcgtctgcatcggcctcgaaacccgtttccgggatattttctcgaaggaaaaccgccgcacgttctgggctttcatgacggcccagatgttcaacatcgtagtcacgctgatcgtggcctacctgttgttcggcgtactgaaaccctatctgaattaggatcggggaatccgaaaggtacagcaatcggcactcttttgggagtgccgatttcgttgccgggctatcgtttgcggcggaagaagtagcttttctgcctgcgtttctcctcctgcgagcgggcgacatagaccttttcgcccgtataggggttttcgcccgtgtagaacatcaccgacgaaaaggtcatcggtgtaggggtcagatcctgcacctgctccaggtcgaagtggagtttgcccaacaccttgtccgccagcgagcgcatgtcgcgctccgtgcatcccgggtgcgaggagatgaaatagggaatcagctggtacggcagcccttcgcggcggcagatccggttgaaatcggcgttgagccgttcgaacatcacgaacggcggcttgcgcatcagtttcagcacggcatcctcggtatgttccggcgccactttgaggcggcccgacgtatgatgacggatgaccgtatcgaggtaatcgctgccgtcgaacaggtcgtagcggataccgctgccgataaaagccttcttgacccccttgaccgcccgcactttggcatagagatcgagcaacggacgatggtcgttatcgaggttggggcacatcttcggatgcaggcacgacggacggcggcatttgctgcacagctcccggtcgcggccgcccatgcggtacatgttggccgaaggcgctccgatgtccgaaaggtaaccccggaaatcgggcatgcgggtcacccgctctacttcgcgaaggatggatttttcgctgcgcgaagtgatgaacttgccctggtgggccgatatggtgcagaaggagcagccgccgaaacaaccccgatggatattgaccgagtgcttgatcatctcccaggccggaatgtcgccacgaccccggtagcgggggtgcggcgcccgctcgtacggcagttcgaacgaatgatccagctcctcggtcgtaagcgtcgcgttgggcggcgtgatgaccgcatagcggtcgccgacaccttcgacgagcgtttcgtccggttccatcaggttgctcaaggtttcgatgcgggtgaagttcttcccaaaggcccgcttgtcggccacgcactcctcgtaggagtgcaggcggatcgttcgggtgggatcgagccgctccacatagctgcggtcggccatgaatcccacctgtcggatatttcgcaacaacttggcgttgaatccgttgttcatcgcccgcgccacctgttgaatcacccgctcgcccatgccgtagatcaaaaggtcggccccgctgtcggcgaggatcgagggatggagcgaatcgctccagtagtcgtagtgggtcaggcggcgcaatgaagcctcgataccgccgatgaccaccggcgtacgcggaaagagccgcttgagaatctgcgtataggttttgaccgcatagtcggggcggaatcctgctttcccgccgggcgtgtaggcatcgttgctgcgcaaccggatgttggcggtatagtggttcaccatcgaatccatcgccccggccgtcacgccgaagaagaggcgcggagtgccgagcttggtgaaatcccgcaggtcgtcccgccagttgggctggggcacaatcgccacacgatacccttcggcttcgagcagacggcccacgacggccgcgccgaacgacgggtggtcgatgtaggcatcgcccgtgaagaggatcacgtcgagttgatcccagccgcgtgcgcggacttccttgagggtagtgggcagaaacatttcaatctcgatttttattcttccgcaagccccgcagcggcataggcgtcccacttagccaacacggtacggaaatcttccggcagttcgctttcgaaatagacctgttcgcccgtagtaggatgctggaagccgaggcttttggcatggagtgcctgccggggcatcgcggcgaaacaattttcgataaactgtttgtatttgttgaaggtcgtacctttgaggatacggtcgccgccgtaccgttcgtcgccgaacagggggtgtcccttccactgcatgtggacgcggatctggtgtgtgcggcccgtttcgaggcgacattcaatgagggttacgtaaccgtagcgcttcagcacccggtagtgggtcacggcgtgcttgccgtccgagccgtcttcgaagacccacatcttctgccggtctttggggctgcggccgatgttgccggtaatggtgccttcgtcctcctcgaaatttccccacaccagcgccacataccgccgcgtgatcgtatggtcgaagaactgtttggcgagccgagcgtgcgcccgctcgtttttggcgatcaccagcagccccgaggtgttcttgtcgatgcggtgcaccagtccggcccgcatatcgccctcctggaacaggggcagattctgcaaatggtatgtcagggcgttcacgagcgttgcggagtagttgccgtgaccgggatggacgaccatgcccgcaggcttgttgaccagcagcaggtcgtcgtcctcgtagggaatttcgagcgggatgttttcgggaatgatctcgatttcgcgcttgggatagggcatcaccagcgagatacggtcgccgggtttgaccttgtagctcgacttcgcgggtttgccattgaccaggatattgcctgcgtcggcagccgtctggatgcggttgcgcgaacaacgctccatgtggatcgtcaggaacttgtccaaccgcagcgggctttgcccccggtcggccgtgatgctgtaatgttcgtacagctcgtcctgctcgccggcagcgtcgtcctcgagttcgtccggatcgggtatgtattgcgattcgctcatcggacgtgtgcgttattggaaaaattcgtcttccgctgtctcttcgtccgggaaaagcccgtcgtcgatgaccggctccgcttcgacgggacggttggccagactgtccagacgaacacgggccagcgaatcggccgtttcagcgtcgaggcggcgcagctcttcggcggcttttatcatctccttatcggccgcagcgctctgggcggtgactttggcagcatcgagggtcagcttcagatcgaccttcgcacccagccgggcacggctgccggccgaaggcgtctgcagataaacccgggcttcccgctggttcagcaggttgattccctcgtcgaaggagatcttgccgatgttgagccccagctcccacaaacggcttttggcctgttggaggtgaagccccacggtcttcggcacgagtgtcgaaacggaaccgctctccccgacgtaaagggtgacgccgctgcccgcttcgagctgtacgcggcttttctccgagatccgcttgccgtcggcgtactcttcgagcacgtaattggtcgccaggtcgggacgatagacgatctgttcgatccccaggccggccacttcgagcatattcttggcctggcgcagcgaacggccggcgacatagggcaccgtcaccatcttctgccggtaggagttgatcgtgacatagaccgttcgtccgggtttgaccccgacgcccttttccgggagttggtccagtactacacccccgtcgtaggcaggcacatacagcgagtcgttgacgatgatttccaacccctgacggcgggcctccccgagagcctcctcgagcggaatgcctgtcaggtcggggaccgtacggtgcgcactgtggcgcgtgcccagcaacagcagcaggtgagttgtgacgcccagcacgagcagcacgcagacgatgatgaaaaggtgtttcaggaaaggatgctcactgactttcgcccaatattttttcagttgttccagcatggtattgttctgtcgtttatgttcggggatcggaactgcctggcggtggtacgtaccgatccgtttcgtctgtttcagggtatctcgttatccgatctcgcggtaaaaggtgtcgcgttcgacggcccggtagccggctgccgcgacgatgcggcgcatctcctccgtggtcatcgccgggcgctggtcgtcggctccggccatcgagtagattttggtcgtatcgtcgatcgtgccgtcgatgtcgtccgcaccgaaagccagagccagctccgtagtcgctttgccgtacatcacccagtaagccttgatgtggggaatattatccaggtagatacggctcatggccagcatccgcaggtcctcggtcacggaaacctcgccgatttccgacatgcggttgccgaaattgcggtatttgagcgggatgaaggcgttgaagccgcccgtcagatcctgctggctgcgcagccgatcgaggtggtcgatgcggtgttcgacgcactcgatatggccgtagaggatcgtagcgttggtcgggatccccagccggtgtgcggcggcatgcacctcgaaccactccgcagtcgagcccttatcgggacagatgcgggcacgcagctcctcgtcgaaaatttcggcacccccgcccggtatcgcctccatcccggcgctgcggagcagacgcaacccttcgtcgatagtcagccccgctttgcggatcatgtaggagagctcgatggcagtgaaggccttgacggtcgcttcgggcaggatcgccttcacgcggcggatcatctcgacgtaatagtacaaatcgtgctcgggatgcacgcctccgacgatatgcacttcggttacgccctgtccggcgtggtcgcgggcgatccgttcgacctcttccagggagtaatcccacgcctcgggacttcccttcggacggcggtaggaacaaaaattacagttgaacacgcacaggttcgtgggttcgatgtggaaattgcggttgaaatagaccttgtcgccgctcacgcgctccttgctccgggcggccagctcgcccaacagccaaagcggagcttcgtgccagagcacgagggcttcggcaggggcgatccgctcgtcggagcggaccttgcggacgatatcttcgagttgcggggacattatttcggtgctttgcgataaagataaacagcgatacagaggtaaagtatgttcggtatccagacagcgatccagggcggcagcgtaccgctcttggcaaactcctcgaagaagcggatgaagaggatatacgagaagcaaagggcaatgccgatgccgatgtggagtcccgtgccgccccgcaccttgcgcgaggagagcgaaacaccgatgagtgtcagaatgaacgtaccgacaggataggcgtaacgggcgtgttgttcgacctgaatgatgttgatcgagtcggaacccttgcttcgctgctgttcgaggaactggttcagttccactatattcattgtttttatcaactggtcagtgcgtcccaattcattgacatccagattaatgagtgtgtccagattgcggtgttgcgtgaaagtttccacaccgagcgaatcgaacgtgcgggtggtatatcgtcgggccgaccaccgcttggtttcgggattgaacctcacctctgcggcttcgagcgatgcggtcatcgctcccgattcgtactcttccaggctgaagaacgaagcctggttcgattccttggagtagttgcggatataggcgaacgtaccgggttcgatctgacggtagatatttttatcgtattggaaacgcgccttgcgcgggatgtattggttctcgaaagccacgcagctgcgctgcgacaccggaatcaaccagaggttcaaccccagagagagcgaagcgatgatgagcgcccccaggaaatagggccacatcagccgccggaaactcatgccgcccgaaagcatagccacgatctcggtctgataggccattttcgaggtgaagaaaatgacggcgatgaaggtgaacagtccgctgaactggttgatgaagaacgggatgaaattcaggtaatagtcgaaaatgatcgccttgagcggcgctttcgtttccgtaaagttgtcgatcttctccacgtagtcgaagatcaccacgaccacgatgatcatcgcgatagcgaagaagtaggtgctcaagaacttgccgaggatataccggtcgaggatcttgaatccggggaagcggaaatgcgggagctttcgtttcatcgtggttcgagtgttacagcctgcggccgagtttggcgaccatctgctccttccagggtgtgaaatccccggccccgatgtgtcggcgggcctcggtgaccagccgcaggtagaatgcgatgttgtgcagcgaagcgatctgcgcaccgagcatctcctggcagatcgtcagatgatgcaggtaggctttcgtatagacgtgatcgacgaaggcggtgccttcgggatcgatcggggagaagtcgtcctcccatttcttgttgcggatattgatcgtgccttccgaagtgaaaatctgtccgttacgtccgttgcgcgtgggcatcacgcagtcgaacatatcgacaccccgggcgattccttcgaggatgttgatcggcgtgccgacccccattaggtagcgggggcggtcttcgggcaggatggcattcaccacctcgatcatctcgtacatcacgtcggtcggctcgcctacggcaagaccgccgatggcatagccgtccgcgtcgtactgtttgacattttcggccgcccgcgcccgcaggtcgggataggtacagccctgtacgatggggaacagcgcttggtaatggccgtattttggggaagtctggcggtaacggttgaaacaacggtcaagccagcgctcggtcagggcgagcgacttggcggcataatcacgcggcgagtcgcccggcgggcactcgtcgaaggccatcatgatatcggcgccgatcgtacgctccgtgtcgatcacgctttcgggcgtgaacagatggcgcgaaccgtcgatgtgggactggaaatggcatccttcctccttgagcttgcggcagcccgctagcgagaagacctgaaagccgccgctgtcggtgagcatcggcccgtcccaggtcgagaagcggtgcacgccgcccgcccgctcgagaatatccataccgggacgcagataaaggtgataggtgttggccaggatgatctgggcccgggcttcgtctcgcacgtcgcggtgaaagatgcccttgacggttgccgccgtacctacgggcataaagatcggggtcttcaccacgccgtgatcggtctgcaattcgcccgcccgcgcctgcgaagaggggtctttatgttggagcgtaaatttcatagatgtctatataacgtacaaaagtacgtaaaactatttataattcataaaaaatggtcgcaacagtgtgcatcgcggtcatgtcgcggccggtcggtgcggcgggaggaaaggatggtgaaaagtcggcgcgaaataacggggccgggaatatacggcggcgactgtcaagggcatctttcaccgcgacgtgcgcgacgaagcccgaatgcggtttgttttatttgattgcaaataaaaattgtaatttatttggcaattaagaaataaatgtttaatttcggattaggaggaaaacttcttccggtcctgttccgggaattttcagcaactcccggaacagggttcgaccgaaaaccctgaaattaatccgttatgaaacatttcagacttttttcactgttcttcggttgctggctattagctagttgtacggccgatccgggcacggagccggggcctttcggtgaaaaccctccgactgctgaaaagccgcatgcggtccctgtcgaacaggctctcgaagagttgcaatccgtcctcgaagagatcgatattcccgcggaagatggcgctgtcacccgcagcggcggcatacggcgtgtgaaaaacgtgacgacggtttctcccgaagtgttgaatcccgacggcacccgcagcgaagctacggccgacgtggaggatctgctctacatcgtcaatttcgagaacgaggccggctatgccattctgggggccgacgaccggttggagccggtctatgcggtcgtcgatgaaggaagcctcacgaccgaagagttccggtatgccgtaaccataaccgatgaacaggcacaagccgacggaaaattcgttttcccgctgcaattggttgcacaggctgcgatcatcggaatcgaaaacgccgatacagatgctgatggaggagtcgcacctatgagcgacgacggacgtcacacgggggatttaggcggcgatgttttaagacgagaatatgtttatgtcactcaagaaaaagtcggaccactgatcccggtgaaatggggacaagggtatccttttaatgcaagtgtcacacaaatcaatggaaaatgttgttgggcaggatgttcggctattgctgtggcacaggttttagtatcaaattattggcattatggttctgtagtcgggtcgatcaaaggaactccgatcgattggacattgatcagacgtgcgattcagaatcctaatcttcttatagccacagaaggaaaaccgtccactcttactcctgaagccaaagctgtgtctatgttaatatacgcaatcggcgttgtcctgaatatggattatggtttggatggaagttctgcgagtctaaaagattctcgagatggtttgacttatgtcctttataagggagtaaatgatcacacttaccgtgatagttatgtacgtacgatgatgttggatcgaaaaaaaacaactatagtaagaggacattctagtactggcagaaaacttaatcatcagtggaatatagatggttggttatatcgaatgcgttatataaaaacttattatcgtaacggtactacatcaatctcttcaaaggagcaggttccacaaacgcttattcattgtaatttcggatggaatggactatgtaacggttattattttagcggtagttttaacacgacgacaaagcctgttgatcaggaaagtgggatagataatgtagaaggtacccaagatggaaattacactgacgatttgcgaatgattacttatacggaaataccttaaaatctcctattatgaaacgaatcaaatatttgggcgtgctgttgtcgatcgttacattatgtgtcgcctgcgaaaaatcggaaaaggatggactaggtgggttccataaaaattttgtcgaattgtatgtcgatgggcagatcatgttgactgaatttcaaaacgaatgttcgggggatgcacataggttatcgaaaaaacagattgcgggatttgtcatatgcataccatctcccaaaatgtattttttttacggaccagacatcgaaaaattcaaccgatgggctgcaagaaacaacgatattgattttaatcaggtattagctaacggtgctttacctatggtcgccacttttgccgataatttcagtaaaatggtcgttacaagcaatgccgactgggatgaagcacatcccgccgggacatcgctcgacgatgttttgcaggtgcgcatcaactcttcctccgatttcgtacacgacggttacgatatgggagaatataagtatgaatttctgcaaaattacgattatctcaaaaccatcgaaaagcgtccgtcggagttgactgctgccgacatgaaaatggtttactattcattgacagatttcagttcacagacaaaatcccctgtaatcgtcttcaccagtgccccgacgctcgaaaaagagcatacgctgacgcttcgctggacgaccgtcgagggcgatgtcaagactgcctcggtcacctgcacgccggaggtcgatcctgcgttgcaatataaattctgatttagcagtctcttatattatatataagaacaaaattatcagaattatgaaagagaacatcattcaggcgatagttgcgaaaatgcagcgtgacttagattgccgacaaatggcacggcttaaagctgtgcttacatcagaactgcataatgtagaaatcattgaaaagagcgattgtgccactcagcaaacgcaggagaatgaacatcttcttaactcttttatatcagccaaaaagatagagggatgttcagataagacattaacttactaccgtaataccattgaacggttgttagtcacgctttcattggcaatttgtcacattacgacaacagatattcgtacttatctatccgattatcaagaagaacaccaatcgagcaaagtgaccattgacaatatgcgacgcatcttttccagcttctttgcatggttggaagatgaagattatatcgctaaaagcccggtaagacgcattcacaaagttaagacagattcacttgtaaaagaggtgctttctgacgaacagttggagcaacttcgagatagttgcacgaccaaacgagaccttgctattatagactttctttcatccacgggcatccgtgtgggtgagttggtcaaactgagccgtgaagatatagatttccacgaacggcagtgcgtggtgttcggaaaaggtaacaaagaacgtgttgtttacttcaacgcccgtaccaaactacatttgcaacaatatcttaatgagcgaacagacagcaatccagccttattcgtttccctcaattcaccacactcacgactgactatcagcggtgtggaagttagaatcagaaaaatggggcaagccctttctatgccaaaagttcatcctcacaagttccgtcgtacccttgcaacaatggctatcgacaaaggtatgcccattgaacaggtacaacgtttacttggtcatgtacgcattgatactacactgcattatgccattgtgaaccaaaacaatgtaaagttagctcataagaagtatttgggataataaccgtgctgatttctactttaaaatttgtacttttgcaatctaatatggaacgctaataaaagcactatggacttgcagagaatcaataaacataagcaatcgtttgatgacatttgccattatatcgaagacgataatggagcggataaagtagaagtatggtttgcgagagaattgcagattatattgggatatgcaagatgggagaattttcaagtagcattgactcgcgctgttgaatcatgtaaaacacagaatatcaacatcgacgaccattttcgtgaggtcacgaaaatggttactttgggtagcggagctaagcgtgaaatacaagatttcatgctgactcgttatgcgtgctatcttgtcgcacagaatggcgaccccaagaaagaagaaatagcttttgcacaaggttattttgccgtacaaactcgacgcgcagaacttattgcggagcatatagaacaattgtcgcgacttgaaacgagagatcgtttgcgttcttccgaaaaacaattatcacgtaatatttatgagcgcggagtggatgataaaggttttggacgcattcgttctaaaggtgatggtgtgttattcggtgggcatacaacagaagatatgaagaaccggcttggcattaaatcgacacgcccattagcagattttcttccaactcttacaattgcagcaaaaaaccttgccacagaaatgacaaattacaatgtcgaacaaaaagacctttatggtgagcatagtataactaccgaacatatggacaacaaccgcagcatccgacaaatgctcggtcagcgaggcatacgcccggaagaactgccagcagctgaggacatcaagaaggtagaacgacgcgttgcttccaatgaaaagaaaattgagaagtcttcttcaaaactccctaaacttaaacctgaagacaacgaatgaaattaattgacattatagaagtattcattgctggagattggggcgaggaaacttactctaaagaaacaccttgtgcggtaacttgtgtacgtggggctgatattattccaatatcagaatatgatttctcggcaattccagtccgctatattaaccaacaagcatatgcaaaaaaatgtcttcaagtaggagacattatcattgaaaagtcaggtggtagcccaactcaatccacagggcgtgtatctttggtatcacaagagctgcttgaccatgccggggctgttatatgctccaatttttgtactgcctttcgagtaaagaaaggttggaatcccctctatgtctactactatcttcagtttatctataatcttggggcgttttttaatttcgaaggcaaaacatccggtataaaaaatctccaattggatgcagcctttgctgctataccaattgaagatattagtgaaagcatccaaaacaatattgtagctattctccaaggtttagagaggaaaatcgctatcaatcgtcagataaatcagaatttannnnnnnnnnnnnnnnnnnnnnnnnnnnnnnnnnnnnnnnnnnnnnnnnnnnnnnnnnnnnnnnnnnnnnnnnnnnnnnnnnnnnnnnnnnnnnnnnnnnnnnnnnnnnnnnnnnnnnnnnnnnnnnnnnnnnnnnnnnnnnnnnnnnnnccttataatttgtatctatctgtaaatacaacctacaagctgtttttgcatacttctctatcatagaatcaggaggtactactaaatctagattttctatatcagatgtgtttattgaagggtaggcacttacggctgattgtgcaatagtagataaattctctattgttgcagcttgaataaggaactgataaatgaagtaacgatatgcactccaatttgcagttattacggcaaatcccgtggaaactaccatattataatcgggattcataataatgccaaaatgcttaagatttgggcgcactgttgagtaaacaatatcgccttcttgcactaatcgccttgccctactcggaataatatcactcgaaggattcagaaattgtagttcatcaattgtattattggtgatatttgacgtatccaaataaaggattgggtgattgaaataaccgttactcgttcttttgttgaaagagcaatgctcgccaagttttaagacattccatccttttggaatttctcttttcagcttctcattccaaaccattttgccaccacttgacttataaggttttccgttttcattcggaaagtcaaattgcacaaaccaataatcataaagctgttttgccatcgcctctaaattctgatttatcgctcgattaagttcaatcttacgatcgagactacgaagcagcttgccaatacgtttctgctcagttaattcaggaatccacacggtacaatccctgattttatcaggcgaagtatgacgaatttttgtttgttgggcagcagcacttaattgttgtttgactaaagtagaagatatgagatagaaaacgaaatccttgtctaacagttcttctttacaaataatctttgccacatcttgactttgaatatatttaccgctttcggggataatggcggtagagccaagcaaaccaatagcctgttcggtcagaggggtaataatatccccctcttccattaaaaattcaggtttgaaatcaccgatgtagtagagattatcttttgacttgttttctttaaaacaattgttctgatagtcaaagttgccgcaagtcaaacggatgtattttccctcagtggcgtaaaactcgccactgagacttgcccctcttgtaacatcaagtatttctcccaatttatattttttcaattccatcacttcatcttattacttttcacccaacattcccctaacttctttgtcgaagtcagaatcaatccgttgagttttattaaaaatatcgtattcgctttctgcctttgtcttggcttgtgccgcagatattcgtcctttatccggcaatatctgatatttgcggaaggtcaagaactcgttgatactggctgcaaattgctccatattgaacgtgttttcacgctctatgaggtcttcgatataatcgaaatatcccgttacagcacgttccaaccgccggatttcattctcttgcaaatagttcttggctattgacacatccgatttcaagatacgcccatcgggagcattcttccatgtagtcagccccatgtgttcatgggtatggtcagccttagtgtagatgatttctgctgccgtttgcccggtaatggcataatgaaaacgattctgtatcatggcatagaaatcgtgtgtggtaggcgagttcttgtcatagtcaatactgcactctgcatatatatcggtaatctgttgccaaatacgccgttcactggcacggatggaacgtaccctttccaacaattcacggaaatagtcttttccgaatacttccgttccctgttttaagcgttcatcgtcaagcacaaagcctttcttgatatactcattaagaatcttggtagcccactgacggaacttggtagcctttggagaagatacacggtagccaacagcaataatcatatcaagattatagaaatcaaccagctcttcaacctcgcctcttatgcctcgatttacgacggttgcaatttttgcaactgtcgtgtcttgctgtaattcttcctctctaaatatattggctatgtggcggctaatacctgatttgtcaataccaaaaagctctgccatagccttttgcgtacaccaaatggtttcgtcttttataaccacctgtactcttccctctttatcgggaagattgtataacaaaaactgtatttcgttactcattgcttcctacattttcgttgaactgcaaagcatccaactgcttcataatttcctcttccaaccgatggctttctttaaattgctcggagagtgtttgtttataatttgccatacggttgttaaactcttcttccgttatatctacataatctatcttgatgtcgaaatattgtccggcagaaagagaatatcctttttcctttatctcatcgtaagaaacagctacggaaaaatcctccactgcctccttgcgctggaatgtgccgacaatcttttctatctcgtcatcattcagacgcacctttttcaatccgttagcatctttatattcctcgcccaatttgctggcatcaatcaagattactttgtcagtggttgcagacttatcaaagaacagcacactgacattcgtacctgtattggcaaacacgttgcttggcatggaaacacagccgaacaccactttgtcatctacaattttatgaagaattttattctcaataccacttttagccgtgataaaacctgtcggaatgacaattgcacctttgcctgtctttttcagtgaattaataacgtgctgaataaaacaggtatatatagccatagattctttctttttggcgggtacattggggactccagcccaaaaacgggctggcatggcggctatcttctcgcgagtgtccgagaagtccatcttgaaaggaggattgctcaccacgaaatcaaactggcgcaactgctgtcggtcatcgctcttgtgataagggcttacaagcgtgtcgccttgaatggcattatcaagcgaagacacaagtccgttaagcagcagattaagtttcaacattttgttgcttcgctgggaaatatcttgcgaaaagatggtacagcgttcttctcctatttgatgactaagtgccatcagaagcgtacctgttcctgccgaggggtcataacattccatgctatgcaaatcagcattatcccccactaacagacgagccataatcgttgctatggcatgaggcgtgtaatactccgcatattttccacctccagcggtattatagtccttaattaaatactcaaagatgctggagaagaaatcgtaattctgtgcaaacgcttcttcaaaggagaagttcacgagtttatccaccagagcacgggcgaatggcgcacgttgtgccgaatcggtcacaaacggcgtcaatgcctcgaacaatggaatcttcgtgttggctgtggtctgtgtggaaaatatatccgcattttgttccgctatatctgtcatagtggaatcgaagatagtatcaaaatccccttttccctgttgattccaaagattggctatcagatgataaggttcaagcatcggaacatctggagagatggcactctgaataagcatacgttcattatcagaaagattctcgtatgctgtttcccattttacatccccagtcagtttctttgctatttcacttttcgcattttttaattcataaccgaatttgtcattcaggaatttatagagaaatacctgagtgataatcttatattcgttaccatcgtttcccataccgtatgattggcaggtagctttaagtccgtcgatgagccttaatgttttttctttaatatctgacataatctttatgaaatgccgtaagtggcgttatattggttgatatactgttgtgaaatgcgtgtctgaataaatttgtaatcctccatttcgggctttatttgtggaaaatggaacagacatccattgataagagccattaccgtacgtccgaaataagcatcctttttcagaatgtcgttacgatcatacactttggcatccacatcctcttttataatattgagaatggcagcaatctcttcgtcaaggaaagagaacataggcttctgtcccttatcttccctctgcttattcacttcacgaatacgcttgtgtacacgagcaaatttttcatcgcccttgtactttttcaacaagacattattgcgtttttgtaagtcttgcagacgaccgatgatttcatccaaagcctgtgtttcttcgttgaacttggctatcgtgtcaatcacaaaaccgtgttctttgaagcgttccataaaggcttcacgcaacgagataaactccggatcgtcttggtcgaagttttgggtaaatgaagaaatggtacgttgccatttctctttcaattccacaccaccggatataaggcgcatttcctcttgtcctattttggagaaagtgaactctatatccatcattgcctcattgattagagttttcgtttcttcatttgtattgaaagcctctttctgattgatgatacttatccgtctttgcacttcagagagtagttgcggcaacttggtgatttcgagtttggcaaattgctctttcatttcatcatcaccgaatgtacgcacgatgttcgccatgttcttggctgattccaatgcctgtttgaggtcgagcaatacagctttatcctcttcggtggagatttcagaagaaaattcttccgcattatcgtatgtgtaattgaaaagcgtttgccgaactttcttcatctgattcaatatttcttccttgtcctcaatgacttgggtaaaggtatcggtggcagcggattcgccagtctcatccacgtcattaaagcggtttaactcttgtaaatatgcttcgttggtttccttgaagttgcgcttgatgtcggcaaagtcaatgacaaaaccgtaacgcataccgggataaggacggtttacacgtgttatggcttgaagcagattgtggtctttcaatttgcgcccgaagtacaggcgtttcaaacgcggcgcatcaaaaccagtcaaaagcatattgaagacaatgagaatatccactgtcatatttttcttgaagtccttgactatctgcttgcgagtttccttgtcatccgtatcgtgaagaatgattccggctttcagcggtctgtattttgatttgtaatccacttctggttcacccactacatacgaaccatcggaaagttttatcttgatgggcttcggctgatacttctgccattcttcttgaaatacatcataaagccgccttgcctgttcgctggtttcacaaatgaccataccgcctaaagtatcatctccttgtatcttgcggaactcctttaagtccgtcataatgaaacgggctaactcgtttacataactaggatgctctatgatttccgacttacgaatgtctttcttttgcacaagggtttccagtttgtcgtacacatcagacaaacgctctttataggaggtttctatatcctcacgtatgattttcagcgtgtagccatccgcaatggatttatcgtaataataggtatgcaaatagtttccgaacaccttgcaactggcacgttcctcctttaacagcggtgtacctgtaagtgcgattttaaccgcatcggtatcggcatcaaagaggttggcaagaaagcagccgccgggtttataccctcggtgtgcctcgtcaagaatgaagatgcgttgaagattggttgcataatcactgatgcgtactttttctttatcctcggcaaagcgttgaatgttcacaaccgtgatttctgcctgtccgcttacaccttgttgtgcctgattactgcggaattgttccatcagttcggctcttgtattggcggtagatacaaccaatccacgagcttcaaactcttgtgtggcttgttccaaaaggtcaaggcggtctactataaaatagaatttggcgaccttattctgtttggaatagaaatcgttaagaatataggtcagataatatgacaaggcagttttaccactaccttgtgtatgccagactacgccagatttcactccctctgccagtttttggcgaatagctaacgatgcaaacaattgttggtaacgcatgatatgcttttggtcggtagattctatttttccatccacctcacgctccatacgaacataggcaataccatatctaatgatatacaacaaacgttcaggcgaacacatggatgttaggattctgtttgtaggggtgttgaaaccaagatttgtctggtactcaggacttgtatgaatgacttggcaattataatcagacaatatctgtttttccaccgtcttgtcaatctccttatacggatagtcacgatggaacggtgctattttctgaccgcttaaattttcttcacggaagcaattgaatggtgcgtatgaacgtgccccagtacaatagaaagccccttgtatgggtacgataccgcccaacgcatcatattccatattattgctgaatatcatcaactgcgtaatgttgatgaagcggcgaaactttttatttgggaagcgctctttattcattcgtgcgctctccgccaacataccaccatgattgttgggtttcttcacttctacaaaacaaagtggcaatccgtttacgaataaagtaatgtcaggacgaaattcgtcttgtccgttcttacaggtaaattcggctgtgaaatggaacgtattattcccaatgttatcaaagtctatcagctttacaggcgaaacagctttgagacggttgtaaaagcctcgaccgaggtcatcatcgttcagttccttacgaatatctttcaaaacttgaagaaactctccctcatgtccgggattcagattcttaaactgccgttcaaatacctgcaaaagaatattcgtgtcactgtcatagaccgtgccattcttatcttcactcaacttgccgaagtaagtatatcctattcgggtgaggtgaaccattgcaggcatctgcacccgtgtagcttccgaaaactgtttcatatcacctatcctttttgtcggttatcaaatccttcaaatcgacctgcaatatctctgctatctgttgcaaggtctctaaatttggttgaatcctattacaggcataagcatttaccatactgaaactcttgtcgagtttctttgccaaccatgtttgagagatacctttttcagataatacagcctttattctattcagtttcattctttgatgcgattttataatgcaaatatagcgaattatattcgataatagtgtatatttgcattaagaaaagtcagttcttaaatgagttatacctcaaagtaattgaattttgacatatttatgggaaagactgtaacaacatatttaattgacggagatcctaaaggaactcaatacgcattcattagcaacaaaatttgccagatgtttgtcgtaccacgttctaatctctcctatttgaatacacaagagaagttacaaaaaccagcattctatatattactgggggaagatgaatcaacaaaaccgcaagcatatataggtgaaacggaaaatttcaaagaacgtgtaaaagaccacgacagcaaaaaagcgttttggcaaaaagcactcatattcgtatcgaaagacgccgatatgactaaagttgatgtgcaatacctagaacataaagcgatagccgaagccaagaaagcaaacgcttttgttttaagcgacaataaacaaatccctaaagcaccgaatctaccagagcatcaacaggactcaatggatgaatttttcgaagatgtgaagtttctggcatcgtttatcggttgcaatatattcgatgtatcacaacccaaagaagaacatctattctacaccaaaggtagagggtgcaatgcaaagggcttctatagttccgatggctttacagtcctaaaaggaagtactgttgccaaaacaatggttccgtctttcaactggaaagaaaaacgagaaaaaaatgcttcaagattacacttctactgagaacggaatattggtattgacgtcagataaaactttttcaagtcccagtactgccgcagatttctgtattggtagcagtaataatggctggttgatatggaaagacaaagatggaaacacattggattcagtttatagaaaacagctggattaataacatatcaattggaagcatatatggaagaaaaaggattgtttggaaattagcaggaatgtaaaatatacaatcaattgaaaatcaatctatgtcaaaagcaaagctaaaaaaacacttgttgtcacttacaaaagaacagataaccaatattgttcttgaactatacgatgcacgtaaagaggcaaaagattatctggagttttatcttgccccagattgcaacgctgaattagaaaagagcaagaaagctatccgaaacgagttcttcccaactcgtggatttttcgaaaagccgtcatttgccaaatgtcgaaaagtcatttccgattttcaaaagctaaaaccggagccgaccactgttgccgatttaatgttgttctatatcgaacaaggatgcgaatacacacttgaatttggcgatatgtgggaacagttctatacaacactggagggaaatttcgacaaggctatgcgctttatctttctcaacggattgttagcctgttattacgaacggattgaaaagcttattgatagcgtatcggattgtggctggggattttatgatacattacaagatatttattctgaatatcggtagtggtttttaatctttgataaagtcttgccctacacaaaaagtaaggaactgaacctgtacgcataatggcacagatttagttcctatcttgtccctttaaactactccattgattcccgaataatacgcaaagtttctttcttatactccttgcggtcatattcaaatcctctgcacatccaacaactacagggagttcctgtcgttttgtaaacttgtgcccatttgtcttttgccaactcaaaccaatgaggatgttcataatagcttccatcctcacgaatgatgcaatgaccataagcggcatacagaatcatacgagccttaaacacacgagccatttgttggcgtctccacaatttgtttcttttgtccatcgtctctttctattaaagttaggatgaacaatgatgttactttggtgagacttaatatatccatagcataatacctttaatgttataccctttcggacacaaaattaagacaaaatatcaacaatataccagtaagggtataatttgtttgtattttttagaggtacagtattttaagcgaataattcaaccttattacactttttccaacgaatatcacccattgctctacacttttttaagcgaatcaaacgtaaacaaaagttttcaggttttatgaccgattttctatcatccaataccttctggaaaataaaaaacacaccgcaaaccacagaaattccaagaaaaccactacctttgtattcaacaagcgttctgtaacatacctgcggaaatgtcctatcattcagcaccttgtatctgatagcggacattccacaaaagggctgaaaagaggcggtacaacacgtatatgcaaagccatgaaatccaacgatttgcatttgtccctgcattctgtgtatttgtcaaaacagaggttgtaccgattaaaatgaatggtcactgataatcagtgatgtaaatatgctgcatcggtatcgaactgggcaacgctcaaaacggcacggtcgatttggggcgcttctcgctcgacaacatggagtcggtgacgctctacaacgggcagaaatgagaaatgtgcggttgaatttccgccaacaggaacgttcgcacctgatggaaaatatgatttacaacgatttgatccgcaggggatattcggtagacgtgggaatagtagaactgacgcgaatcatagagggccgacgccgctcgtcgcaatacaagatcgacttcgtggtcaacgtgggcaatgacaaactgtatatccagtcggcattacacgtagacacgccggaaaagaaggcacaggaaaccttctctttgagaaacaccggcgacttcttccgcaagatcgtcgtgctggacggcaacagcaagccgtggacggatgaggatggcgtcatgtatgtgggcgtgatcccgttcctgctggaagatattgtggccgaggcgatcggataaaacaggggacggcgtttcctgtcccgcagggaaaaacggacggtacggactatcggtatccaccacggtacaagaggctgtcggccggcttgccggcccctcctgccgcttttccaatgcaaatacgggttgtttttgtcgtttttctacgattcgaggtttttgggcggaatacaaaaggatggcgaccagagaaaaaagggacggggagcggcttgtgcataaaccgctccccgcgcgtctgtctgccgtcacggcctgacgggccggaaccggaaggagcgtcaggccagcagtcggtcgatcatggactgcaaccgcaacagatcgcaatattgattggtgccgccggtatagtcctcggcatgccgggccgtgcggatcaggaacgaatcgagttctattctgaccgagccaatcctccgggacaatccggaggaatggtttatgtaaacgaatttgccgttgcgctcgacaaaacagctcgtaaagtaatgccccttggtcttggctacgaccgccgcatccacggctttggcatatttggatatttcacggacgagcgccgtctggaaattccggtattctctcgagacataacaccctgcgtccgcaaggaagacatattgccatttggtataaaaactctgtgccataatccaatttgtccgttatcgtgtgttctgtaaataaattcgccactcctcgccgtcgatggtaaggctgttcagttcccagtcgtactccacttccggcatatcggaataagggaaatgaacggcatagcctatctgtccgtaggaacagagcagcggcgtgacgcaaacttcacgaccgaaataggtctgcggagtacagtatttgcgccagtcgaaacggcctgcggtcacattgccgcagagccgtgcgaggatcgccccgtccgtcatcgctttcatacgtcggcacctcctttctgtaccaacgtcagttggccggggcggtcggggaaccaataggcgtcgttgtctgaaaagacgatgccgcaatcctcgtcctcggggtaacggtgcggacaaaggaaactgtccggacggcaaaaccccagcacttcgtgggggccgaacgtcactccataatcgtttgtaaagagaaccgtgtcgccgacggccaggtcgtcgtccgtgtcgatgacctccgaaagacggtcgtaaatcatcttgccgtgttttttctccacttctgccttccaacgcagaaattccgctttgtaacttcgtttcgtactcatttcaatgctgttttcagggtttcataaagcgtgtcgatcattgcctcggccgcttccatatcgctcacgatgtctttgatgtggtaaggggcgccgttcttgccgtgcccgtccgtgccgatccacagataggcttcatagtcggagtcgtaagcctcgtaatacttttccagctcttgcaggaggctgtcgggatcgccgttccgcatttcgacgctgaagccgaagtcctgtcctgcgggcgtgtactgccggaactcgaactccgtgaagccgggacgactggcgtccgtttccacactccagcccaaagcagtggccacattggtaatctgttctgttgttgtcatcgtttccgttttttctttccctccgttcgatgtcttccgacttcgcccgaaggggatgttttcacgtgcggagtcggacgggggatgcgagaacgacgggcaaggaaacggaaggaaattttatgaaaggccggaatcccggattccggaaagtttgcgtcaaatttcattacaggtaacggcagcggtccttgaaccgtgttcgtccaccgtacctttgcacacgaaaacgaacccggcggcgaaagtcgagacaacgagagggttatactcggtatatcgggcgtcgtccggcaggtatataaacggaaggggcggcggtccaagccgtccacagggtgagctataaaagcaaccgggggcgcaaacagcaggaaaagatacgaacgtgcataccgtttccggtacgggattcgttatataggtatcaagggatacgccggcgatacggacttttcggttatatcccggaatttattatctttgccgaacaagaggatagccttacgacgaattaaatacctgaccgctatgacacatataatgatcgaagacaatacgcccgaaggaaagtggctgctggagctgatccggggacacaagagcgtgactgtcatggacgagaaaaaaaagaaggggttccgggaagccgtggcagaatgcaatggccgtcctgccgctgaatttttcgacgaaatgagccgacaggctaaagagcatttcgaccatgcgtgaggttatcgtatccgaacatctgtggggtaagattaaagaggtaaacgattatctcataaacgaattacacctgtctgaagaagcgactgaaaagcgaatccgcaggatggaacagttcgtcatggattttgcgaaacgggtcgatcatcccttgtgccgtttcaaaaagtggcggacactgggttaccactgcgccgtattcgaaaaagactgggtattcgcctacgaggtgttcgacgaaggcgtgatcgtgcgcgatatggccaataccgcactcttggcggaataacaagatatattcatcaacgcaaatcgtccgaagcaggatattcggacggtttgcggtccccctaccccatagccggaacgatttacggacctacaaaagcaaccgaaccgcaaacagcggaaaaagacgggaaaagatacgaacggctatccgccactttacgcattccgcgaattgttcatccagtttttcgacctttctttcatcatactaccggattacataatccggcccatcttcagtgttcgatccgtggtagagtttcatctcatacctccgccgttattgtaacacacacgggtcaaatcctgtacgctgtcgccgacaggtgctcagcctcgtagtgttcggcgagaaagtccaaccccttgtagcggttcaggtagttgccggcttcgcgcaccgtcatgccatgcgtacgtgcaaattcgcctatattggccacaatgtaaccgattaagcgccggtctacgggaaccgccacctgcaagcacaccgacgccgactctttcgcccagtttctcctgtgtcattctgcaacgggtccgttcacggcggatcaaaactccgatattgttgatttccatattcatagtctctcgatttcacaaagaaaatccaaagttgcctattttggaaactatgcggcaaaaatttagcttaaaaaagtaaaaacagcgtccggcaggtatagaaacggagcggagcgcgtgaggcttagaaatggccgcaggagatatttccgccggaacgtaatttcagagatccgcaggaaatgtttgcttttacgccccgaatacgggatatggcgcaactgacagttcatgattctgccggatttgcagtatagggataaaatgagcactctccccggttagacgatggcattccgttttaccgttcttccttccgatattatatatcgaaacgacttcctttaccctatccggcccttcgggagaatagagaaaatacagatcggacacttcgaataatatttcgcatatctctttcccgcacattcctctgacagcactgtcttcggataccatttatggattataatctcaatccaaaataccaaaatgtggggattgcgagggggggggnnnnnnnnnnnnnnnnnnnnnnnnnnnnnnnnnnnnnnnnnnnnnnnnnnnnnnnnnnnnnnnnnnnnnnnnnnnnnnnnnnnnnnnnnnnnnnnnnnnnnnnnnnnnnnnnnnnnnnnnnnnnnnnnnnnnnnnnnnnnnnnnnnnnnnnnnnntataatcgttaaaatatgaaacattttacaatcaaactaatgacggtggccgcaaccctgctggccttcgcctcttgcagcaaggatgatgacggaccgtcagggaagatcgacctgaaagttcaggctgttgctccgactacggaggacaaggtttcggactattctcagttcaccgtaaccgtatcctcggagcgtgacgggaagaccatgacggaatctctggatgcctccggttccgcgacattcaacctcgatatcggcagttacggaatcgagatccgcggcaaggagaacggcaaggaatatttcggtacgacgggtatggcgcaatacggccagagtaccacggtaagcgtcgacgtggagaacctctcggtacactatacgggcaatatggacggcatcgttctttccgagctgttctataacggcggcacctacggcggcacgatgatgcaccccgaccagtatatcgtcattgcgaacaattcggaccgtgagatcaacgtcagcggactggcactcgcacaggcttcgaatatgaatacgctgccatgctcggacctgacctcgcttctgccggattacgtggtggctgccaatatttaccagataccggccggacagaattatacactcgcaccgggcgaagtttacgtcatcgcttcgcaggcgcagaaccacacggaaagctacacgcccaatccggagaaagacaccggcattccggtcgacctttcgggtgccgatttcgaactcgccgataacgacgcagccatgtccggttcggccgtggacaatccgaaagttcccaacctgacgaaaatcgccaacagcatgccgggcggcgtcacggcatggatgcatccttatggtatccgtccgctgttcctgttcgacgccagcggtatcgagtggagttcgttcaagagccagaacgggtttacctacaacgaccgtccgaaaaaggatgccgccattcaggaatatcagggttacaaggttcctacgaacctgatcgtggatgccatcgaaacgacctctgcaaccactccttactggggtaattacacttccaagtcgctgcctgtgaccgtcgacaaaagctatgtccaggctacgatcgaaggctgtcaccacaacacgttcatgtaccgcgtgaaaggtaccgacgggaagttccaggataccaacgattcgagcgtggatgtgaagatcgaacaccgcagcgacttcaagggttacccggaaggctggagaaacgaataatcaccggagaatggatttgtcagggctcgtccgggaaactcccgggggtactctgacaattctgtaattccggtcccagataacggggcaggtccgtatacggagaccggaatggaatgacgaggggataaatgaagaaactgatattcatagccttttttatatcgggtctatgctccgcactcttcgcgcagacggataaagccactgtggagggtgtcgtccgggactcggacggcaagccgctgagtttcgccacgatgttcatcgccgaactcggaacgggagtctcgacggacctcgagggaaagtttcggtttacgggaacgaagggaacggaatatacgttgaatgtttcgtacctgaaccatgtcgacaaggaggtcaaggtgaaggccggtagcccggaacccttggtgatcgtactcgaagaacaatcgtacgagctcgcggaggtggtcgtcatggcggattataagaaaaaccaaggctctacggccgtcatcaaccaacaggcgttggagcatatccagcccacgtcggtagccgacgtgctgtcgttgatcccgggcggattgttccgggagtcgagtgccaccggtttcaaccgcatatcgctgcgtcagtcgggcagcgacgacaatacgtcgctgggtatggcagtcgtcatggacggcatccctcaggataacgacggctttcgggcttctatcccggggttgtctaccgacgaatacagcgaccggctcggcatgaacaggggcatcgatctgaaaacgctttcgaccgaccatatccgcaaaatagagatcgtcaagggcatttcctcggccaaactgggaaacctctcgtcgggcgtcattcagacgacctcgaagataggcattactcccgcacagcttcgcatgaaggtcgatccgcttaccaagctgatctatctgggcaaggggttccgcatttcgccgaagatgggttatctgcataccggaatcgactatacttcggtttacgacgaccgccgcgaccctatgagcaaatacagccgcctgacgggccaggtcacctataacaattccgtcgatgtgggggacaagacgctattcctctttttcaaactgtccgaggtctatacgctgaaccaggctaaggaggacgagctgacgcaggattacaacgagtcgttccgaaacaagtattcgaggaccggcgcttcattcaaggcgcaaatgtacgatctggggaagatcgtcgataatgtcgagttcatcgcttcggcggactatacctacgacctgatagaccgcaatcgcctcgtgcagaccgggacgccgcttccgtccccgctggcgacagaggagggcgaatcggagggcatataccttccttctacctattacagtcccttccagatcgagaacaagccgttgtcgctgcttacgcaactgaatgccgaatctcttttcgagacgcgttctttccgccacaaggtgatatacggtctttcatggaagcggaccaagaactatggggagggcgttatggtcgacatgacccggccgccctatccggggaacaacgaatacgtgcgtccggtgcccaaccgaagcattcccgcactgtcggtcggcgcagcctatgcggaagaacaactgaagcattcgaaccgctggttcgatttcgagctgaacgccggggtccggtttacgcagatgttcaatttagacacgaaatataccgaattgagaaagttgcaggtcgaaccccgtatcaatgcggcgttgtcgttcaatatcgatcttgccggcggcaaatcgttacgcaatatgttccgcttcgggttcggacaggagaacaagctgcctacgctcgattacatctacccggacagggtctacaaagatatgatcgtgttgaacgcttataccaagcaggacgatccgttcaaccatctgatcacctatacgaaaatctacgatgtcacgaacaatagcctgcgtccgaaccggaatacgaaatacgaagcgggatgggatgtggaatacgaaggctactccctgtccctgacttttttcaaggagcactccgaccggggattcgaaagcgtcgccgagtattctcccgtacgttacacacgctatgtcgatccgatcgacggacagccgatcgtcggccgccggccggaaaaggaggattatgtggcggacccgtatgccacgttcgtggatatggacatcgtacgcaacagcatgaaggtcgagaaaaaaggtctggagtacctgctgcgcttcccgaaaatcatccctctgtccacgacggtggagatcaacggcgcatattatgatacgcgttactcttcgggcgctccgttgcagtaccatcctgccttcagggacgacgaccgtccgcaaccgtacgtgggaatttaccggcgtcaggatatcacccgccagcggattttcaatacgaacctttggttcaacacgaatattccgcgctataaaatgattttcactaccttcttccagttcatctggctgaatgaagagatgcgtatcaacggagatgaatacccttccgcctatttcgatacggacggtcggatgcataccgtggacgaccggatactgcagtcgattaaggacggacatacggtgtggcggcactatcatatctataaggaggatttcagcgaaacgctgcccgtatcgctgacggttaatttcaaggtgaccaaagagttcagccggatgatacgcgcctcgtttttcgtgaacaatattctggacatcaatcccctgtataagaaccgctacaaccagaacgtgcgcgtatggcagaaatcgttcttcggggccgagatgacattcagtttttaatatacactgaggatgcctttaagacacacatatttcacaccgggaatcgtcgctgcgctcctatgcagcctgtgtagcgttccttccgtcagggggcaggagaggctgacctcgacggcgtcgaattccccgttgcagaccgagttcgagaaccgttcgttgcggcccgggacggacatgcgggacgcttatctgagaaatccggccctgatacaccgcatggtcggcgagcggcgctacttttcggccgaaaatcccgggttcgtcagagagaagcccggtacgatcttcatcgctgcggacggggcttccggacgacaggaaggggattatctgccttacgaggggcaggagttccgcgatttttctgtccgggcggacggatacaagcagggcgaccgggcgacgttcttcgcccggatcggatttacggcaggaggaaacgacaacgtcggttggagcgcactgcgcaatcccggactgtactggccttacattgttgccgattcgacgggcggcgacttccgttatgaaaagtacgatctgatgtgcgggtactcgttccggctcgggcggttcgatctgggcatgtcgggggaatatacgggcgatttcgcattccgccagaacgatccccgtatagaggatatctccacgtggcttacgttcaaggccggtgccgcctatgcattccgccgccatgtcatagccctgaacgcggaattcatgcaccatcgccagcatgcggatgtcaaacacttccggaccggacagttcgccggtttcttcatcgaatacgggttcggtatgttcgactacattttcagcccgattttcaattccatggaacaacggcagcatatcaacgcttacggcgtgaatctgacgttcaattccgacccttcgcgggcgttgcgcctgaatctgttgctgggatacggccgtgaaacgatgaagacggaagagaacaattataaggtgaatctctaccgggctccggccaatactttcgatgccgatctgggcatattgtggaatgaccgtcggtggggagcggaatttttggtgaaggccgcttatgaggataaaaagggaacggaaaatatcttcgaacgttatatttcgtcgtctcaggacggtgtggacgtgtacgatttccgcaagatcggagaacagaaccgctatggaatgaagcgtctggacggaagtgcggaactcaaggtttcccgttttctgggacggcactataccgtgtcgctgctcggaggcgtcggctatatgatgcgcgaggagacctacaaggaccacgattacctgatccgcaacgtgttgctgaccccctccctcggaatcggagcccggtattccggggagaagttcgatgtggagttgcgcggttgctggagccaccggacagttcccgagagccgctatgaggtcggagtcgacctggaaaaaaacacggaattccagcatgcgttcacgacttatgcctactatgccaatacggcggagctgtatacggcggaactgaccgtggcaaggcatttccggttcggaacgttcggtctgcgggggcagatgctttgcggacggggcaaccgtattccggaggccgtctacgatctttcccgctacgagcaggccgtaccatcgacgtcgcagcatacgatcagccggacgccggaccggcacgactcggtctggttccgggtgtcgctgttcaccgttttttaacagaaaacaatcaaattcaattcatacacataaacacggaagaaatggaaataaaagtattgggaggaggatgctcttcatgcagccagatgtacgacaacgcccggatcgcagtcgacgaactggggttggatctggaggtggagttcattcacgacatcacgaaggcattgcagtacgaggtgctgcagatgccggcgctcatcatcgacgaaaaggccgtatccttcggccgcgacctgtcggtggacgaaatcaaggaaatattgaaaaagtatcgataaccaattaaaagaagacgaaaaatgaaaaccgtaaaaatcatgctgcctcttctggcagccctcatgttcggcaacggagttgtccgggctcaaaacgaggcgaagcacgacaaaccggccgtagaggtcgtcgtgttccatggagtgaaacagtgccagacctgtcaggctatcaagaaaaattcgcaggaggtggcggaggaacttgccgccgacgggaagaacgtctcttaccgggtcgtggatttttcgaaacccgaaggcaaggacgaagccaagaaatatgagatagcctggacttcgctgttgctgatccgtcacgatgccggtgataaggaaacggtccgtaacatttccaagttcgccatcgaaaatgcacggacgaataccgaaaagttccgcaagcagttggccgaagatatcgggaagctgttgaaagaataagcccgtgcgatggagcaattcgtaaattctttactcgataattgcaatctgccggttctcacggcgttcctgctgggtatactgacatcggtgagtccctgtactttcacgaccaacgtcatggtcctcggatacatcggccgggatatgagcggcggcaggcgtgtgttcgcaaacggactgttctatactctggggcgcatcgtatcctatacggtgctgggactgatctgtattcccgttttgaagaaaggggccagcacgttttttgttcagagcctcgtcagcgactatggcgggtacattctcgctccgacgctgatcgtctatggggtattcctgctgctgggcagtaagttccctttcggcaagttcggtttccgagcttcggagagcagcaagcgtctgcggggcagtttcggagcgttcgtgctggggctgctgttcgcgctggccttttgtcccatcagcggcgtattttatttcggtatgctgttgccgatggcggcgctggagccgggaggctacctctatccggttgtattcgccgtggcctcgggaattctggtggtgctcatcgcctggatcgtagccttcggcatgtcgagcctggggcgattctacaaccgggtaaaccagttccagaaatggttgaacctgatcgttgcggtcgcgttcattttggcagggatttattattttgtgatttattacatttaatgtatcgagatgaaaaaattggaattgatgaaagggccgttttcgcccaaagaaaaaatcgagtatgccgaaggcagtatcgtaagtcaagagttcatccataaccgggcgggtaacctcacgcttttctcgttcgacgagggacagcaactgagcgagcataccgcgcctttcgatgccgtatgtcagatactggacggggaggcggaaattcacatcgcagaggacgtttatcgtcttacggagggtcagatgctcatcatgccggcaaacgtaccccattcggtacatgccgtgaaggcattcaagatgctgcttattatgatcaagggataaacctttattcctgcgccctttttctgtccctgcagaacaggaaaagggcgtatttattcagacagcaaaataacagccgggactactccgtcccgcaatcgacagatgaaaatatatttcaattccggaaggaccgagactctcgagaagaaacgccttgaatccctgctctgaaataggttaaaattcattgctttattcttatacaatttgatttcaagttgacggaagaagatagaaaagtaatccacagcctgaatagcggcaagttgaaagtggtccacaacacccctatacaggcaaaattcttctgggattacgacaaaaatctcaaaccgggcaactgatatcctgcttaaagaatccggaatacaacatctactaaaaaagagagtatcgacatcgatactctcttttttatccgcttacggatgaatctccgttttttccaatttgtcgaagaacagttctaccttcgagtgccggttggcttccgtaggaacgtaatcggaaatgccgccttcaccggtcttggtgatcctgtcggacggtaatccccgcttgttcagctccgaggctatatagtctgctctcgaaacactcagggcgtcgttgataccgactgttccggtcgcactgtcggccgctcccgtaaccttcaccgtcagaccgtatttcgttgcaactcgtaccagttcgtcgagattgaccaactgggaggggtctgtcaaacgggccgtattgaggctgaaaaagaaatagacgggagcgccgatacattcgccgccggccggccggaaagcgacggaatccgcagtaagggagtcgcggcgggcattacacccgtaccgggaattcgcactaccggcctccacacgcacggaaaccgacccgccgccgggccgaacctccgtcgtatcgaggggcgacgttccgtcccactgccggttcttcagccgcgcacgcagcgagttcagcccgctgtaattgttcacagggtaatctttgccgacctcgccgtcctcttgcaggatatgcccgtaagcgtcgagcaggccctcgatctccagtatcttcttcagctcggccagcgtccgccggtcgcagtcgtgccggcccgcatagcgtcggttctcctccgacaggaaatccacatactccgcaagccgttcgctgcggcggatatagggtgcagcgtccacggcccgcttccagccggtcttgccgatatggaacgtgaatccggcggtcagcgacagcatgtggtcgcccaaacggttggcgcggccgtagccgtcgaagtcctgaaaggtggtcgtgccggagagttccgcgacggcgcttacccttcgggagatgcggtactgcccctgtacgccgtaggagaccgcaaacgggttgtgcccgttcgtagcatgatgcagcaggccgatgcccgcaaagggaacgagcccccagcgcacctgctcctgccgggcatacccgcggccgagaacattccacagcagatccgcatggacatagtggtacctctgtgtggacaaccgggcgtccttgaagcgcgatccgctgtaattgatccgtgcgccgaccgagggcgtgaaccacttgccgacggcgaggctgtacgatgtttcgatgcgtccgaacaggtcctcgcagccgagcagcgtaccgagaaaggcggtcgagcctccggcgataccgacaaaccagttgccgcttccgcgcatcggaagaatcacgccgtcgagatgggtgggctgcaccggctggagcagctctgcggcatcggtgaaggatgtgtaccgtacagtgtcagcctgtgcgggccggacactcgcgcgggcctgcaacgagcagagcgccgcgaagataaagatgatgcgttttgtcattatccaatcgttttacctgttatactttcattcgttgcgggagatgatgccgtttatcgcttgggctttttgccgatggccgggcgcatcatgcggctggccatcctcatgcagcggagtgcccatgcgcggttgtcctcgtcttcgtcgcgcccccacttaaggtcgcttccgccacttccgccgccgtgcgtttcggcaaatgtagtggcatcgtcgaccatcccgaggaagagcatcgtcgcgcagtgcatgacctccgcgccctgttccgcgattgcctgtacgagcgtgtcgtcgaacagttgccgctgcggagcgtccagccgtgccgacaggttccggtattcgccgaccagaccttccagcagggcgtctttgagcagcgtgtccactttggagtggacatctcgcgagtaccggtaggcttccgcccggagctcctccgtgcgttgctggacggcatccatgttctctttgaggtcggcgagttgccggtcggctgcctgtagtttaccctgcttgtcggccagttgtctgtcgataccttgcagctccttttgcaacgactcgatcagcatctccagctccgccgcatcgtcgctgttggctgccagatcgcgttcggctgccgatagctgcgcctgcttttcagccttcgacttttcgaggttatcgaccatcgtggtaagtcccttgacccggcgctctgccagccggatgtccgactggatggagaaaagcacctttcgatggcgatcgatattctcctcaaaggtcgtacactcctccgaaagcatacggcggtactcctcggtcgtgagatgccgggcgcccgtttcggaaacgctccgtccccgcgacatcccccacttcgtattgacttcggtgaaaaaatctgtatgaagctgtttcatccgctggctgaactcgtacttgtcctttccggcgaatatctccttgtatgcaaagcggccgtctttgatcggcagcagcgtacagtgtacatgcgggtttatttcatcgaggtgtacaatgaaggcggcgatgttctgctcgccgtatctgccgctgacaaacgcatagacatccttcgcccagcgttcgatgtcgcgcttccgctcgacgtcggaattgtccgcccccttatcgaaatttaccttctgcgaaccgaacgccagttcgcgcatgcggtcccgggaaccgccgaagatgatattgaccaccgtgcggtatttcggttcgtccagcccctcgttggggtccttgatcccgcgccggtccaatatttcagccatccgttcaggaatactgcggcttttgtcgacgggacggaccttgccggacacgatctcgaagttcagatgttcccggctggggtcgtaattgcccttttcgagcgcctgttcccatcccttctccgtccaacggcgctgatgttcgttgctctgcgatgtcgtgatgcctttcgatacccggacatcgagtacctgttttgcttttgccatactttttcgcgttgattcggacaatccgccgtgtcccagcttgctgcttgtccggacaccgctcccgccggcgtcagccggtaggggtattgagctaccccacccttcgtttggtggcaggcgggcaagcccgcgtgcccgctacaaccggcagaatgcctggccggaacaggggcggattgtcggggttatacaaactccgtttccggccttcgggtcaatccgcctcctccagtacgtgtgccgcaagcgccagaaaggacttgcggaacgatttgaggccctcttgcgttgcgtccggctctgtggtcgtcccgtccgcttcggcatcgagaatgagccccgcaagcaccttggaggtctcgatgagcgacgaccactccccgccgagatcgagacggaagaaatccatgaactccagacgatcgtcgaacctcgaccggcgcagcacgcgctgcatggcagccagggcgatacaccccatagccgtcgcatggattccgaccgccagcggatcgtcgtctttcgacgccttatccggatcgacgcggacgccggatgcggtcatcgcgctacggacgagctgtccgcacgccgagccggtcgcggaggagtccgcatagccgaccacccaatcggacagtacctcccgcagttgcgcggcaaggccggatacggactgtacatcgtccgccggagcaggctgtccggactgcacggccatggtaatgaccacgctcttgggaagacggatgcgcgtcagcagaccaaacgactccagcgtgtccagaaaggaacggacggtagcgcggtgccagcgccactccacagccaggtcggaaacggtaacatggcactggcagggccggagttcataatcctggcgcctcaaatacgaagagacgaatcctgccatcgccttgtccaacaggtcgcagtaggcttccgttctcgtctttcgttcgccgactttttccttgaggtagtcgaaaacctccatttgtgccagcaccgtggccggcattcttttcttgttttccatattcgtcgatattattgatgataatcgtgtgcggatatgtcggagctgccgccgtccgcatcatgcggcaaccctgcgcgatgatcgtagcgatggggcacggcagatgttgcgggaggctccgcccgtccgggctccacctccttgccgtcgcattcggacatggcccgagcggagggatagaacagagctgccaaaaggcagtaggcggcagtaacggccacggggtacagaccgggcacgaagccgatagccacggccgcgagcgcgagctcggcaaaggcccgcggccggccggacaaaccgcgcagccaccggtccgtccgccgggaggagaacaatgcggcacacgctccggtagagagcaggacgccgaagccgctggggtgtccgttcgtataggcatagtggtacaggagcagcaggacgagcaagagctgcgcgtagaatttacgggccttggcgtcgcgtgcccgggcgtcgccctctcctgccggaaagcggcgcttcctgctatacaatgccgctgtaagcacaaaaggcagtgcggcaaaggcgaggtgtacggcaatccacatcataggtagtagggtttttcacgcacgggaacgggcggtatcacgagttccaggcggacaataccgtaggtcgccaagcggataatggcctcggcatccgcgggggaaaggtacatggccgccttcttgatgcgctgccggaacgaagcgtcctgcttgcggtgggtggccagcgccctgtccagttcgtgttcggggatctcccaggtcgtaccctcggcgtactgaccgttcgctttgaacgcccggagcaccagcgtgcgggaaacgacgtaatcggtacggtcgcttcttgaaatgatatgctccttgtagaggttatcgtcggcaacctttatccatgttcggtacatgttgatccagtagaccatctgtcggtacaacgtgtttcgcatggctcggtcgtttacaggaaatccatcagtacttcctccttgatcttcttgtacttgaacgtgccgctgcgggcatggagttcgaggtcgaggcacagatcgccgtacatcagctccagcgaatcgtaaacggtggcgacgacgacatgcaccttgccgtcctcttccgtccgggcgttcatcttgaacatctgtccgaaggcgggattggaataggcgcacgtactatagccgaactcgccgacacgcatggggatatggtggtagagcgtgatgagctccatgtcatcctcgaacatatccatgacctcctccaggtcgtaagagtcccggagcgggaaggtaagcagcacgtaatcgccgtagaactgcggcttttccatcgtcgtcacgtcgatcaactgcggcagttgcagcggaacgagcgccatgaagtcgttataaaagtgtcgtagcatattcattgcgaatgaggtttacagcgtgtgaataaatgcctccatgagcattccgggcaattcgtcttgtcggtcgcccgtcgattgcagaattgagcccaacgcctcgaacgcggccgaggtctgcgcggcgatctcgtcgaggcgctcgcgctcttgcggagagagcagcgcgaggcaaaggccgtccatggaagcatagggctggaggagcatccagatgtaggcacacgcctgctgcggcgttttgacccgccggttccggatgtcgtcgatgcaggtatgggcgttctgtatcagccggcggcccgtgcgcatcgccagaaagagcatggcatcccgccaggcgatctcgccgcgcccggcggcgaggaagacctgcgagcagcagcgttcggtatcgcatgcgatgtcggccacgtccgagcttccgagctcgtgcagatgcgtgaggaagccccgaaagacggcatcttctcttgcgatgtaggcggtcaggtcatcgcggctgtggatgccgtcgcggatgctttcggcgagcagcgcccggtaggtcgaaagcacctgtcgcctgtcgtcacgacaggccggatggccgtccagagaggcgaaaaacgggcgaaccgtttcggccgcgcggcgcagctcctcgtccgcggcgtagggcgagagccgctccttgagcatgagcagctccccgtaagtgcgtggccccgacaaggccagacgggagaactcgatgcggagcgaatcgtgtatcccctcgcacaccttacaggcatcggaaccaggcaggccgagcgtgtcccgtcgcaggcgtgcaaaaacggaatcctttacggtctgccaccgtttaaggtgtcccgccagttctttggccgtcaggtggtccaagcgccgtatttcggacaggtacccgcggtaggtgtcggcaggatcgtccgagcccacggacgacggtttgccgtttccgctcccgcacgaagagaacaggaacaagacggtcgaacagacggtcaatacggctaaaagcgccggacatcttgaatatgattttctatttttcatatcccaaattcatatcattagccgcaaatctatatattattttcaataagatagcaaataggaatcatattttacataaaaacaaatatcatattcaacaatatgattatcaatgaaaacaagtgcaataaagagtaattttagagtatgatttcagaggatttcaactctgaatatgattttatcgaattaaaatcttatctttgtgtccgttatcctaaacagtgtatagagatatggcaaaggtgggttacatattcaaggctaattcctatgacgcgctcgatgcggacaaagaatggatgcgacaatacgggtgtgtacaggtggtcgaggaagagtgcgcccacgaggcgctccggccgcagtggaaacaactcatggcaagcctcggcagaggcgacgaactggtagtggccaaattcagcaacgccgtgcgcgacttgcgcgggctggccgcactcgtcgagctgtgccggatcaaggtggtgcgcctggtatccatccacgacaaaatcgacaccctgggcgaactgtttcccgatacaacggcagcccaggtactggagatgttcggggccctgcccgaagaggtagccgtgttacgcaagtcgtccagccatatcatgcaactgcaacaaaccatcaagccaccggtaacgaagaaggccatgtcgagggcggaacgggaaaaaaccatcgtggatatgtacaacaacggctattcgatcgacgacatctggaaggtgagcggctttaacagcaaaagctcaatatggcgcgtactcaacaaatacggcgtatatctcaaccgcggcagaaccagcggcccgcgtgtcaaaaagcaacaggacgagacaaaataaccgaccggcggcacacgggggaaaacagaagggaacgccaccctgtattgctttttcgccgattttgcatatctttatatggggtataatctttaattcggaagctatgttagatattattatcgtattggcaggattctatctattctgcggcatcgtgagggttctgctcggaggattcggcaaaagcgactatcagcgcgaccgttagactgcggaatcgcatgccgcatctcatggaaaagacaatatcgttatcgcataaaactcacataaaacaagaactgaaatgacaaaagccgagttagttgccctgatcacacatcagaccggggtagaaaaaacggcagcggaggccgttgtggaagcatttatgagaaacataaaggagacgatgatcgccggagaagatgtgttcttgcgggggttcggcagtttcatcgtcaaagagagggccgaaaaagtggctcgcaacatcacgaagaacacgacgatggttattccagcccattccatccccgccttcaagccatccaaagtatttctggaggcagtaaaagaggggaataaaaaaggataaaacgctggtcctgtcaggggtagcatggtatcattcggccccgtcggacaatgaaaaacgcaaccgcctgtcaacggcggttgcgttttttggtagacagcccttacgccgcctcgctcttcgggttcatcggtccacaagcatccggttggcatactccgcaatctcctcacgggtcagccaccggggtttttcgtcttcaggaaaaccgtcgtaaagtcgggtcatccactcgatttgccgcgcttcatcgccggcccacaagcggccggtactcctgttaccgaaaccgaggtaatactcgcagtccgattgcagccgcgccagcaacatgtatctgaatctcttgtcccggcgcattacctcctctaccgtcattccttctgtcttgttcattccgttcatgtctataaagatttaaatttctctttttcccctccggtagtcctgtaccgaaggccgattgtttttctgcctgcgggattgacggccgggccaggcaaggaggatgcggaaaatacactcgccgtttagtccggggaggaagattttccgccagccagccaaaagcggtccttgacagggccggcagccggcaatcaatttcgcagaataaacaagcggcttgcgaaccgggtacaaggcgaagcggatagaaaagggaaaggcgtatgcgcaatgaatgggtagccgggccgtcgggacagcgtaagacagactgtttggtataagaggatggccccgatttgagtgcaaaataccgcaacacatccttcggacggttgcggtatttcaaggtcacgtgtgccactttcaagcgtgcaacttgcggcgcctgatcttccagccgtaaatatcggcgacatacggatagagggaacgtgttctcttgcgaaaaccgacttcgtcgatttctccgctatagatcttgtcggcgatgcgttccgcctcgcttctatctttggcgatgcggtacaaagcgtaattcatgccgtcatgatgtatcatgcgcccccggatattgtagctgtctccgtaccactccgcgtcgtcgcattgggagtacaggatgtcggcaatgttgctgcccagaatttggtacccttgccgcggtcctctccatgtgcccaccgaggcgaacgcgatgataacgccttcgatttttttatccagattcaagcgttcatcggtcagggagccggacaccacgtccgcccactcggcgtcgctgaccgtgtacgtgtcgtcttcctgcacctcccgttgcaattcctggtactgctctcttgcctcgtcgtccagcatgtccatgctcgaccaaatcatctgttttttcatacttcctgaattttaatgttcgtttggcttactttttcatccctctcttcggaggtttccacctcgtccgacggggatttaatttcacgtgcaaaactccaagccggaaagaagggaacaaggcaaggaggaagcggaaagtcacagacgattgcatttgggttgaacatgcctgagcgagcctgcgagtcgatggccgtcaaccgcaaatggaacgcgccttgctggttcccgcccggcttaacttcgcacagggaaatcaatgacgtcggagaaagggcagaaatgagtgatagcaataccgacaccgcaatgagcaaaataaaagcggcccgaaggccgctttgtcgggataaggcaggatttacttcttgccctttttcgttgtctttgccggctccgcaggttcttcctccttttcgacggccgggtagaacctgacggcgaccatcacgatgcggttgtgcagcacgccgtccttgtcggcccactcttcgggcttgaagtagccttccacggtaagcagcgtgcctttggtcagcacgtcgaacgagtcggcattctcgttcttacgccacgcttccatgttgacgaacgccgacacgcgcttggtatcctcgccgttcttctcctgacgggctaccgacagcgggaaacgggctacgcttgcgttggtgaactggcggatttcagcgtcttttgccacgaatccggttactgcgaaactgttctcgatctttttcattgcgattgttttttagaagttaataaatcagttttacggtgcttaaaaagtaggtgcagcagagggatgcaccaaggatagcgcataaatacgctttattttggggcgcaggcccaaaccgcaggctcgataaaggaagatttgtgccgctacgccattggtcaagatctgacaggtcgtgcccgtcggcaccctaactttgcagcgaaaaacgatggggcgacttcgacagaaaacggtcgcggaaaaggcggggaaaacagggagcagcggcattcgcggatctgaaaagacccgaccgcccatcggcaagagtgcagcacgttccggcgtgaacccgggaagaacatcgaggcggggtaagcgaagcgaccgcgggtggcatggaagcggcaaaagatggtatgccaccggactgaccttggcactgcgtccgcggaagggccgtcgaacgaaggccgggtaaaaggcgtgcgtgaagcatcggtgtcggccgcatcaggtccatctgggcagaatagcgagggaaaggagggaaaaaaggaggcaaaggaaaaacggcgggagcctacccctccggcaaaacgggaaaggcgctcccgagcaaatggacgggttctaaaaaagggaacggcgcagccggaaggaattacaaacggcggttccgacagaagcggctgcgtgtcgcaggcgttatgcctgaagcgtgtagcgattcgggataaaaaagtggatcgtgccagcgtttgccgctcggacaaagaaaagcgggctgaaacgggacccatttcagtccgcttttctggcaatcagaaccgggcaatcagaatccggtgttcgaagattttgcttttatcgctcgcccgccgctggcagacccagaggtggtgcgccccgtaaccgtagacgaaatactcgtcgagcagcgtttggttcttcaggtgttccatgcccgcccgaagatcgtcttcatgcgtggagaagagaatcgtgttcacaatccgaaaataaagctctatcgcttcgtcgcaataagggcaaaaactgtgttctatcgttacttccataattacggcacttcaacaataacttcaattcttccgtacagcatcgaacgcaaggctgtcttgtcgatggcgtaatactccgttatgtgcccgtactgcttgacaaaataccgtttcagcacgtccgaaaaatcgaaaaggtagccgcccaaggcaatcccccgcctgaaacgacaacactcccacacgtttcgggtaagccagttcttctcttcacgggtcaatttgtcgccgttattgaggcgctctcgcaacctgtagaccttgctgtctttcaggccatccaattcgggcacgtcccattggacgaatttcatcgctatctgtgtcattgcttcaattatagataatcacttcatcacggaactcgacaatctctttcccgctggtcaggcggacgactacggtgttaccataatcgcctacgattgtaccttccgtataacctttgtaaggattcatcagcgaacaaggcgagccgataatatcgctcttttcttcgtattcgtacatagcctgtgcattgagattaaaacttaatattccatgtgccctgcgagaatgtccggaaactcacgtactcgtctttgagtgcgtatgtcagaatgcggatgtaaatctcgtctttggcatccagcgattccaccagcttgtctatttctttttccgggtaaacccaaagggatgagaattgtgcatcgagcatgtcttccgaacgctcgatgaagcaatcggcaaaattgtcgtccaaaaaagcctctactttgtcgaggtctcgttcgttctccgtacttgcgaagaagagattcgttgcgtagtctgccataatcttaaattttgagtttcttttttcccttatgtagcatcagctactttcgggcttgattgaaaattatgtcgcctcaaaaggtgttatggctgtttttgcagggtttcacgatcaaatactacctctgcgaagcggagcgtggagattttatcgtgaaccgtcaggctctgaccttgcagaaaaaaagacatgacagatacctttgcgacacaattctcatcagacagaccgaaagttgatgtgcaagatggaaatgtagaaagatacaacggtaggatctaaagcggggagttcgttaaacaggaacgacgtacaaaaggcaggttgctggccaaaagaaaaagagataagcgttcttgttgccgatgtccgtcatttcgacgttgtgaaaaaggtttagtttagaacttgaatagatatacaacaaaccagactaaactcctataatcgaccttttgcgtggattacataaatttttcatatctttgggaaacggaacctccgatatggaataaaaagcgattctatatttgctctttttttcttttggccagcaaaattccgtccccagttcgtcccccagcatatttttaagcgttgtaataaactaaacatcaataatataccacaacataacatttttttttcgagaaattatcaaaattcgcttgcgtaatccataagaataggggctgagcagtcagccccgacgagctttccatgcacgacaactgcataaatagggatagtcatttaattccttcaatttgagttaaccagcagactttcccttatttttccgatcatactcatcgttttttttgtgcctggaggttggcgtgggcatacgctttacagcacgtattcgtagtgggggggcggtttataaacgcagccaaaagccgggaatgatggcgcccgaatccgaaatcctgttaatgagctgaatatcgtttgaaaaatagagagaattcgttaaattgtcttgaaataaaatcaatatagcgtttcttagatggggccatttagagatagatgctgaaaaatagattcggttatgaagaaaatattttgtttagtttgttttttctctgctttattttcgttgaaaagcattgctgctgttcctgagggagctattccgtttgttttcgacggacatctgtatctgcaatcgaccttgaatgatactattcccgttacccttatttacgatacaggagctgactttctctatctcgacgaagattatttgaaactcaaaaatctgcaaaacgctttcggacgaaaaggtaaggctaaaatgggaggtgcggggaatggcgagcctgaacgcatagaaatattcatcgatccgattacagtccattgcggggcgagggaataccaaaacgagattacacctataattaagttgcgtgatctcctcgggaggcacactgacggcttgttaggtaatactcatctattgatgaatcctctggaaatcaatttcagcgagagctatttgcgccagttaaaaggaccgttgttagctgaacagctcgataattatgtaaaactcgacgctcgattcgaggataaccgtatcgatgtaaaggcgacgctgcaaatcgacgatgaaaatagcctggagggttggtttagaatggatttagggtgcggctccacgattattctcacgaatgaaacggcgtctgcatttaattttatggatgtgccgaaggcatatttttgcacacaggccggaggtatcggcggcggttctgaggaggttacgataagggctgcaaaattctttatggccgatacgctcgaaaatctcgtgatagattactcgctcaatgaaaagggggcattatcgtcggacagaccctatataggtataataggtaatgaaatctggtcgctctacgacattgttttggatccggtaagttcttctgtatgggttaaacgcaatgagaatcagggtacctacgcccaatcgtcggtgacgcatatggctactgttgaccgtacggatatttgcggtggctggattgtcaatggcctatataaaggaggagtcgcggagcaagccggtatcgaaatcggtgatataattgtagccataaataatcgtcctgtcaaagaaataacctgggaagagcaacgaaaaggtttggaacttcagggagaaactacatataccgttcaaaaacccgacggtcaaatcgtttcctatactttgtttattggtaaacagattatttgacccaactatatcccatatagtccggagtttgctgtttccaaaaaatttatggaaaggacgagtatatgtcgatatggaatcgggaccgaggacaatcggtaaagatgccgctcgccgtcacacgccgttccgctttgtttttgaatgtatgatccatattattcgccgaaaaactcgcggataattccgtatgttttgtaagtttggggataattatgtgcgactatgaaacatccggtagatattgataattggaatcgtcgggagaactatctttttttccgggatttcgccaatccttattacagtgttacatcgcaggtcgatgtaacggaagcgtatattcgggcgaaagcgctgggtatcaagttttcgcactatgcgatgtacgcttcgctacgggctgtcaattccattgaggcattgaggtacaggcaggtcgatggaaaggtctggctatatgatcggatcaggctcaatacggcggttgcgcgtgaggatcactcctttgcatcggttatcattccctataaggatacgctggagaagtttgtcgctgaagcgcgagggatcattgcggccgcgctgcggggcgagggagatgcgtacggagccgattccgagaaggacacgtttgttataagtgtgaatccgtggtatagcttcacagggttacagttccagtttccgcagaatgcaggcgagaatatccctttgtcggtattcggaaagataatggtcgatatgcagggacgccgtacgatgcctgtggctgtaagtttccatcatgggtttgtcgatggttatcaggtggggcgttattgggaggcgttccaacataatctcgatacgctctcgatgtaaaatacacgatccgatttcggccggagttttagtcgttttcaccgctgtccgcagggacaggtaggaacaacggggaacattgaggaggcatataaagaattatttggcattatcatccgtaagtcgtatcttgcggcggcccgattttttgagagatctattgtggcatcgtggggcattgtggattcatatttgcctgtccgaaggaggcttatggtagcttatcccttgtaatggggatggttttctgtggttttagcctgtttcggcgattgtagaatatggataatacggcgatctttgtaacgtgaaaagagataagtgttaatagggttgatgaaaggttagagaaaaatttttgccaagaaattttatttgttaaagattgtgtgtggaaaagtctgctgggaagcagacttttctgtttttgggtgcgaatatttcgtattgtccatcgggggtattgttttcgaaagcccgcgcaagagtacgaataccgcagagtcgatatattggccggtcgcggccgaaagtgaaaaaagccccggatgttgcatccggggcctttcttttgaagggcaggtttattatttgcccatgtagtttttcacgtagtggtggtgctgtccgtagcgctcgaatgctgcccggtccagggattcctgggccgaaggatcggcgatcgagatgatcagccgcgcacgctcctgcaggcttttgccgtagagattgacggcgccgttttcggtgacgaaccagtggatgtggttgcgggtggttaccacgcctgcgccgcaggtcagttccggagcgatcttcgagatgcctttgttggtcaccgaaggcatggcgataatcgccttgccgcctttcgacagcgaagcgccgtagatgaagtctatctggccgccgacacccgaatagaatttcgtacccagcgaatcggcgcaaacctgaccggtgatatccacctggagtgccgagttgatggccgttacgcggtcgttcttggcgatgatgaacggatcgttggtgtatcccacgtccatcatcagtacgcccgggttgtcgtcgatgaagtcgtaaacccgctgcgaacccatcaggaaggtggaaaccatcttgcccttgtcgatgttcttcgcttcgccgttgataacgcccttctccaccagcgggagaacgccgtcggcgaacatttcggtatggatacccaggttcttgtggttgccgagctgtgccagaaccgcattcggaatagcgccgatacccatctgaagcgtcgcaccgtcttcgatcagggccgcgcagtgcttgccgatgcgggtttcgatctcgttgggttcggtgaaatgtgcctcttccagcggggtatcgtcctgtacgaagaggtcgattttcgacgagtggatcattgcgtcgccgaacgaacggggaacgtgcttgttcaccactgcgatcaccgtacgagccgtttccacggctgccagggtcgcatcgaccgaggtgccgagcgaaacgtagccgtgtttgtcgggcgtcgatacctggatcatcgctacgtcgcaaggtaccgtgccgctgcgatagagcttctgggtttcgctcaaaaagatgggaatgtagtccgcatagccgctttgcgtcactttgcgcacgttcccgcccacgaagaacgagtcgagctggaagatgccttcgaactgcggatcggcatagggagccggcccttccgtgtgcaggtggtggatgtgcacatccttgaattcgtggttggcgccgcgttcgcacatggccttaatcaggcactggggggccgaagcgaccgagctgaggtgaatatggtcacccgatttgatgactttcacggcttcggctgccgttgtgaatttaatctgagtgttcatttcttttttcttattttagataagattccttgcattcggttagttgcgttttacctcgacttgctcgtaaccttcgatgacatctcctacgcggatgtcgttgaaggattcgatgttcagaccgcagtcctggcccgtgagcacctccttgacatcgtccttgaaccgtttgagcgagccgagcttgcccgtgtagatcacgataccgtcgcggatcacgcggatcggggtgtggcgggtcagcttgccttctcggacgacgcatccggcgacggtgccgactttggaaattcggaagatctccatgacttccgccgagcagacaatctcttccttcatcaccggttcgagcatgccttcgatggcatccttgatgtcgttgatcgcatcgtagatgatcgaatagaggcggatttcgatctcctccttttcggcgagcttgcgtgccgatgccgacggacggacctggaagccgacgatgatggcattcgaggccgccgccaacagaacgtccgattccgaaatctgaccgacggccgagtggatcacattcacctgcacggtctccttcgagagcttgatcagcgaacccgacatagcctcaaccgaaccatcgacatcgccttttacgatgatattcagctccttgaacgatccgatggcgatgcggcgtccgatttcgtcgagcgtcacgtgcttctgggtcatgatgccctggatacgctggagttgctcgcgtttgttggcgatttcacgggccgagcggtcgtcctccatgacgttgaacgtgtcgcctgcctggggagcaccgttcagaccgagcacctgtaccggcgtcgaagggccagcttcggtcactttttggccgttttcgttgaacatcgctttcacacggcccgtgtgtatgcccgaaagcattacgtcgcctatgtgcagcgtaccgttttgtacgagcaccgtagccacgtaaccgcggcccttgtcgagtgtcgattcgatgacggctcccgaagcgcggcggttcggattggccttcaggtcgagcatttcggcttcgagcagcactttttcgagcagtttgtcgagattcaggccctttttggccgaaacttcctgatcctggtatttgccgccccacgactccacgaggtagttcatctgcgaaagctgctccttgatgtggtcggggttggctgcgggtttgtcgatcttgttgatggcgaaaaccatcgggacgcctgctgcctgggcgtggttgatcgcctcgacggtctggggcatcacgttgtcgtccgccgcgacgatgatgatcgctacgtcggtgatcttggcaccacgggcgcgcatggcggtgaaagcctcgtggccgggggtgtcgaggaacgtgattttctggccgttcagctctacactgtaagcaccgatgtgctgggtgataccgcccgcctcaccttcgatgacgttggttttgcggatattgtccagcagcgaagtcttaccgtgatcgacgtgtcccatgacggttacgatcggcggtcgcggcacgaggtcttcctcgctgtcctgttcgtcgtcgccgatggcttcctggatgtccgccgatacgaattcggtcttgaagccgaactcttcggctacgaccacgagcgcctcggcgtcgagacgctggttgattgataccatcaggcccaggttcatgcaggccgtgatgacctcggtcgccgaaacgttcatcatcgtagccagctcggctacggtcacgaattcggtgaccttcaggatggagcgttcctgctcttcgcgctggaattcttcgttcatgcgctcggctacggcttcgcgtttttccttgcggtatttcgaacctttgctcttggcgtttttcgacgtcaggcgggccagtgtatctttcacctgcttcgaaacctcctcgtcgctgatttcgggccgaacgacgggcttcggagctttgagtttgtccttgcgggtcttcttgttctctcccggacggggttggttggattgcgggccttgtccgcggccgggctgtgcggcggatttgccgttgctgcccggcttggggctgcctgccggcgtacgggtcacgtccactttctctttactcaggcgtttgcgtttgtggcggttgcccggtgtgaatcccgatacgtccatcgtgccgagtacctgcgggcccgtgagggtctgcacggcggggcggaagatgttgtcgctcttgggcgccgcttccggttcgggtttggctgcggaagccgtttcggaggcaggtgccgcttccgttttgggggcggccggttgcggtgccggctgcggtttcggagccgcagcctccggtacgggctctgccgccggtttgcttaccggtttcggagccggtttgggcttgggcgaaagatctattttgcccagaattttgggctggggcagttcgtccttgacgctgatgacgttgcttttgataattacctcctgctcctcttcgcgcgtctgtttctgtgcctcttcgagggtgatcgtagcctgcttctgggagattcgctcccggatgctttcccgttcgttgccggtaattcggctcccgccgaattccttctccagaacggcatagacgtccggttccaccagcgtattgggcgaaccgtcggtttttatacccttcttttgcaggaagtccgtgatggtattcaatcccaccttgaactccttggcaacctggataagtcttaattttctttcgttactcatatatcggttttaatttttgtgcgatgggacggattactcctcgaattccgctttcagtatctcgacgactttctgtgcctgttccagctccaggtcggcacgggcggcgatctcttcgacgggcagttccagcacgctcttggccgtgtcgcagccgcaggctttcagggcgtcgatcacccagccgtcgatctcgtcggcaaattcggtgagtgcaacgtcttcctcctcgatttcgcggtaaacatcgatatcgtagccggtcagcatcttcgaaagccggatgttcaggccgcccttgccgatggccagcgatacctggtcgggcttgagatagaccgaagctgtcttcttctcctcgtcgatggtgatgctcgaaatcttcgcggggttcagggcacgctggatcattaactgcgggttggtcgtgtagtttaccacgtcgatattttcattgcgcagctccttgacgatcgagtagatgcgcgatcccttcatgccgacgcaggcaccgaccggatcgatgcgttcgtcgtaggattcgacggctaccttggcacgctcgccggggatgcggacgatcttcttgagggtgatcagaccgtcgaaaatttcggggacctcctgctcgaagagccgttcgaggaactggttggccgtgcgcgaaaggatgatgcgcggctggttgttgttcatctcgacgctcttgacgatcgccttgatcgtgtcgcccttgcggtaatagtcgttgggaatctgctcggtcttgggcaggatcagctcgttgccctcgtcgtcgaggatcagcacctctttcttccatacctgatatacctcgccggtgatgatctcgccgaccttctccgaatatttttcgtaaaggttggccttctccagatcgaggatgcgcgaagcgagattctgacgcagcgacagcacggcccgacgtccgaacgattcaagtttgatcggatcgacgtattcgtcgcccacttcgtaggtcggatcgatggccttaacctccgatacggcgatttgcatgttcggattctccaccgcgccgtcctccacgaccgtacggtttcgccagatctccaggtcgcccttttccgggttgatgatcacgtcgaaattctcgtccgtctcgaactgcttctgaagcgcgtggcggaaaacgtcctcgaggactccgatcatcgtggccttgtcgatgtttttaagctccttgaactctgcgaaattgctgataagattaagattatccattggttttttatcttgtttatttttgaatttccactatttgaaatcgaggtattccttcgtgtatttgatctctgagaaagggtagcggcgcgtaacccgcaccgtctgtttccgctttttaccctctacggcctgcttctcctcgtaggagagggtgagtccctcctggtccgcctcgtcgagcgtcgccagaatcttcacgccgcttttgagcagcacttcgaccggcttgccgatcagtttgcggtattggcggaggtgcttgagttccgagccgatgcctgccgaagctaccgtgagggagaaatcctccgtgtcgcggtcgaattcggcctcgatcgcgcggctcagctccacgcaggtttcgatacctaccgaggtgtcgctgtcgatcagcagttccacttcgttggcgggcgaacaggtgcaatccactacgaacaggtcggtgccgacgagtttggcattggctatttcggtgattttcgtacaatcgatcatatttgctgatgttatcaataaagtcgttttccggtgcgggcagttcgtgcaaatccggacatctgtccttccccggcgaaaacttgaagttcgttcagtcgtttttgcggccggcccggaggcgttcggctttttgacgaaaatgtaggaaatcgtcgcttcccgttcgttttcatcgtcttgcgtcctgcgttttcttcgaacattgcatcgcaaggagcactattcgcgcccgaatcttgtccctgttgtagcaggagctgtaatcgggtacccgcatggcccgcaactgccggtttctcccgacggaatgggcatgcgagggcatgcgggtcgagaaaatcgtgcggatgattcgccggtcgggagcggtgaatatatctacgaaataaggggacttgctcgtccccttacctctctatacccgtttacgctacaaatatagcgaatgttttcctattttcaaacctttgtgtcgaaaaattattcgtctttttcgttgctctgagagtagggcttgataatgccgcgctgcgattcgcggatgaaccggatgagtcggtcgcgttcgggactttgcggaatctgtttttcgacctcctcacagccgttcaggtagttcaggccgctttggaagaggatgcggcaggcgtcgtgaatttgtgagatcgtttccggcgtgaatccgcggcggctcagaccgacgcgattgacgcaggcgaaacgtaccggatcgttgttgctgacggtgatgaaggggggaatgtccttgcccaccagcgcgccgccctgaatcatcgtatgctctccgatgcgggtccactgatgtacggctacgtggccgccgataacggcccaatcgccgacttcgacctctccggcgagcgatacgcggttggccatgacgcagtgactgcctaccacgtcgtcgtgggcgatatgcacgtaagccataatcaggttgtggctgccgacgacggtcttgccccgggaggcggtgccccggctgatggtgacgcattcgcggatttcgttgtagtcgccgatttctgccgtcgttttttcaccgacgaacttcaggtcctgcggggtgcaggcgatcgatgcggccgtatggatcttgcagcctttgccgatgcgggctccgtcgtggatcacggccccggggccgatccagcagtcgtcgccgatcaccacatcgccggcgatgtaggcgaaaggctccaccgttacgttctttccgagtttcgcgtcgggatggatgtatgcctggttgcttatcatgtgcggttactctttatttttaacgatctgggccatcatcgtggcttcgcaggcgagtgtttcgccgacgaaggccttgccttcgactacggctacgcctcgtcggatgggctccagcagttgaacttcgaaatgaagggtgtcgcccggaaccaccttgcgcttgaattttacgccgtcgatcttcatgaaataagtcgagtagtgctccggatcaggaatactgcgtaataccagcataccgcaacactgcgccatcgcttcgacgatcagcacacccggcatgaccggctcttcggggaaatgtcccacgaagaatggctcgttcatcgtgacgttcttgatgccggctaccgtcgtgtcgtcgatgtagaagatgcggtccaccagcaggaacggcggacggtggggcagcatccgccgtatatcgttgatgtcatagacgggcggtttgcggcagtcgtattggaaacggggcttttcgccttcgcggcggatggtccgttttacctgtttcataaactccgtgttggcgaaatggccgggacgagtggcccatacgcggcccttgatgcgtttgcccagcaaggcgaagtcgcccagcaggtcgaggagcttgtggcgggccaattcgttgttgaaacggagctccaggttgttcaggtagccgcccgtgatgcggatatcctgtttgttgaaaattttcttgagatgttcgagctgatcgtccgggacgggattctccacgacgacgatcgcgttgtccaggtcgccgcccttgatcaggttcatcttcatcagaggttccagatcgtgcaggaagacaaaggtgcggcagggggcgatcttcgcggcgtaatcgtcttcggggtcgaatgtcgcatactggttgccgatcaccttggagttgtagtccacgtgcagcgatacggaaaattcgtcgtcggggtaaaggatgatggccacgcctttttccggaatcgtatagaccattttttcggtgacgtggtagtaggtgcgttcggcttcctgaggttgcaggccggtttcgacgatcgttttcgcatattctttggccgaaccgtccatgatcggagtttcaccggcatcgacatcgatcgtggcgttgtccacgcccagggtccagagggccgacatgatatgttcgatggtcgcaacgcgtgcgccatccttttcgatggtcgtgccccgcgaggtatccgtgacatagtcgcatagggccggaatttcgggtttgccttccaggtcgatgcggcggaaaacgatgccgctgttctccggggcgggatgtaccgtcatcgtcactttgacgccggtgtggaggcctgtacctgaaaacgagatcggggctttgagggtttgttgtttggcagccataatctgaatttattcaaatcgcaacatacattcccgctgactgccgggtcccgacgtgtgtggggccgaccgtcattttcggaaatgtttatcgcattatttgcgcgcaaatataggaaatattattcaaaaatcgtatttttgcctaaattattgataaaccgaaattccgtggcatcacccgacagaactcctcgtcctccgaaattgcagcttcccttcgagcagaaaaaaaacgatgcgggagaatgggcttacgaccatcggatcggattgtgtgtcacgttgattgcctatttggtgcttgcgatcgcctttatggtgggaaaaatcgtcgtgggggccaaaccttccgtgcaaggcataatcattgatacgaaaactttagcggagctcgaggcggagaagatgcgtcttgaacaggaggtacgggctcgccaacaggcgcaggaaggcggcgattggcgggatgtgcgcaaccagtattccaacgagaatgcgctcgaggagcggtcgcgtgacgaccgtggctcgatgtcctcgtcgctgaaagaatccgccgaagcggtcggcgaacggatgcaggccaaccgggacgcttacgagcagggattggccgaggagcgtgcgattcgggagcgtatggggcgcagcggcaaggacgatcggacacaggacagtcgggccaggggacgggtcacggtttccttttcgctgaccgatcccgtgcggacgcgccgttatctggaggtgccggcctatcagtgcgagggaggcggcgaagtggtcgtcggtattacggtcaatccttcgggagaggtcgttgctgcaaaagtggcctccggaggcgatgactgtatgcgggaggctgcgctggaagctgcacgtaactcgcttttcaatatcgatgattcggcgcctgcccgacagtcgggaacgattacttacctattcattcctcaatagggtgcggtgcctgtcagcgattgtacgcgacaggcattttttgtaaatttatataaggatttcctatgcataatatcattacgaccgaaaacattctgttgatcggagccttgcttcttttcgtcgcggtaatggccggcaaggcggcctatcgtttcggcgccccggccttgctcttttttctgggggtcggtatgctgttcggcatcaatttcatttcgttccattccgtcgaagcgacccagttcgtaggtatgatcgctctttgtatcatccttttcacgggcggtatggataccaagttttcggaaatacgaccggtgatcggaccgggtatcgtactggcgaccgccggagtcgtcatgacggcggtgatcgtagcgggtttcgtcacgctcattgccccatgggtcgggctggccgtatcgtttcctgcggcgctgctgctggccgcgacgatgtcttcgacggattcggcttcggttttctccatcctgcgaagcaagaaacaggggttgaacgagaacctgcgccctctgctggagctggagagcggttcgaacgacccgatggcgtacgtgctgaccattgtgctgatcggcgtattgtccggcggcgcagaagccgtgagcgtaccgatgagtatcgtaaagttcgtcattcagatggtgctcggcggtctgatgggctacgctatcggccggatcggtgtatggacaatcaatcggatcaatttgagcaatcattcgctctatccggtgcttttgctcgctttcgttttctttaccttctcgtttaccgacctgattggcgggaacggatacttggctgtttacctggcaggattggtgttgggtaataaccagttgacgcagaaacgttcgctgacgatcttcttcgacggcttcacctggctggtacagatcgtgatgtttcttacgctgggtcttctcgtcaacctcgacgaactcttgcagcccgacgtgctgatgctgggctgtctggtaggagccttcatgatgttcattgcgcgtcccgtcacggtgttcgcctgtatggctcctttccgcaagtttacgaccaaagcccgtctttatgtttcctgggtcggtctgcgcggtgctgtgccaattatttttgcgacctatcctttgctggccggtacggagggagcgcggttgttgttcaatgtggtttttctggtgacgattctttcgctgctggtgcagggtacgaccgtaagttggatggcgaatctgctcgggcttgggtatgccgaaaagagtcctgccttcggggtcgatgtccacgaagatattccgtcgatatttaccgaggtccttgtcaatgaatcgatgcttcaggggggcgctacgctcaaggagatcaacctgccggagaatacgctggtgatgatggtctatcgtgacggagattatttcgttccacagggcaataccgaactgaaggtcggtgacaagctcttggttatttcagaccggggcgaggagctggagtccacctataaggatatgggagtcgatgaagtgctgaaactttgagatatttcctgcagatcggttctctctgttatcgaaacaaaaaagctgtcgttttcgacagcttttttgtttcgaatatatcttgaagattagatctcccaagtagcgcccgagtggagcaggtcgtccacgcagtggatcttgctctgggctttcacctcttccacctgcttttcaacggcctgatcgtaaacgatttcgtcctcgaccgaacggattacaccgagtgcgaccggatagtcgggatatttcattgcggccagcatcgagtgcagcgtcgtgtctttggtgtgggcgtcgtgcgtcaggatcttgtccagcgtatagccgtcctgtccgaccgttacgactttcaggcgcatatcctcgaacaccagacctttttcgttgttggcgccgaagagcatcttctcgccgtggcgcagcgtgatggtgtgctcctggcgggtagccttgtctccggcgaaagccgcatgggtcttgtcgttgaagatcacgcagttttgcagaacttcggtgaccgacataccctgatgtttcgccgctgcgatcagacactctttggtcagattcacctccatgtcgatcgaacgggcgaagaaggtgcctttcgcgccgatcaccagttcgccggggttgaacggcttttcgaccgtaccgtagggcgaggtcttggtgattttgcccagcttcgaggtcggcgagtactgacctttggtcagaccgtagatctcgttgttgaacaggatcgcgttgaggttgatgttgcggcggatcgcgtggatgaagtggttgccgccgatggccagcgagtcgccgtcgcccgaggtaacccaaacgttcagacgcggattcgcagtcttcacacccgtagcgatggcattggcgcgtccgtgtacggagtggaagccgaaggtcttcatatagtaaatgaagcgcgacgagcagccgatgcccgagatgaacgtgaagaggttgtgcggcgtatcggtctggtcggcaatttcgggcagggcccgctgtacggcattcagaattgcgtggtcaccgcagccgggacaccatcttacttcctggtcgcttttgaagtctgccggagtatatttgtaatctgccatggctttatttcagtaaagagtgaaacttgttcgtgagctcggtcaccgtgaacggctggccttcgcacttgttgtactgttcgtagtcgaattgctgcaatttgccgcgcaggtagttggcgaactgtccttcgttgagctcgcaaaccacgatcttcttgaagcgcttgaagatgtcggcgacgccgtgcggcagcgggttgatgtagttgaagtggcagagcgaaactttcttgccttcggcacgcattttatcgacggcattctgcaggtgtccgcgtgtaccgccccaacctactacgagcagatcgccttccgggtcgccgtaaaccgtctggtgcgggatgtagtcggcgatcttggcgattttcgcggcacgcaggttcgtcatttcctggtgattctgtgggtcgatcgagatactgcctttcagcttgtctttctccagtccgcctacacggtgctccagacctgctttgccggggaatgcccaactgcgtgccagcttctcgttgcgggcgtagggcatgaaagggcctccgtcctcggttttgtcgatgatcggcgggttgatggtcgggtaatccttcatcgaagggatcttccacggttcggaaccgttggcgatgaatccgtccgagagaagcactaccggcgtcatgtgctccatggcgatacgaccggcctcgaatgcgtagtggaagcagtcgctcggcatcgaggcggcgatgaccgctaccgggctttctccgttgcggccgtagagggcctgctgaaggtcgctctgctcggtcttggtcggaagacccgtcgaggggccgccgcgctgtacgtccacgactaccagcggaagctcggtcatcacggccagacccaatgcctcgctcttgagcgaaagaccgggacccgacgtggtcgtcacggcgaagttaccggcgaacgaagcaccgatggccgtacagatacccgcgatttcgtcttcggcctgtacggttttcacaccgaggtccttacgtttggcgagttcctcgagaatgacggtagccggagtgatggggtacgaaccgcagaagaggggcagaccgctcttctcggatgcggcgcaaagaccccatgccgttgcgacgttaccgctgatcgaccggtaagtgcctttctccatctggcccgatgcgacggtatatgtattggcgaactgatgcgtgttggcggcatagttgtaaccggcgtcgatagcgcgtttgttggcttcggctatagccggatttttcttcgcaaattttgaatcgaggtagtgtttcgcatgatcctctggacggttgtagaggtagaagcagatacccagtgcgaacatgtttttgcacttgaccatcgctttgttgtccagaccggaatccgccaaagccgccttggtcatctccgtaatgttcggaacgactacgttgaaatcttccaggttcagctcccggatcgggtcgagcgttgcgaaacccgctttccgaaggtgctcttcggtaatggagtcctcgtcgaggattaccgttgcacccggcttgagccatttgcggttcgccttcagtgccgcagggttcattgcgatcagtacgtcgcagaagtcgcccgggttgagctgtcttttggctccgaagtgcacctggaatccggatacacccgctacggtaccttgcggggcgcggatttcggcgggatagtcggggaatgtcgagattccgttgccgagcaaggctgaagtgtcggaaaagagcgtgccagtaagctgcatgccgtcaccggagtcgcccgaaaagcggatcacgacatcttgcagctcttgtaccttgttttcattcattgctgtatgtgaattagtaatataataaggttgctttattgggtcgttttctgtggccggcacggtttcgatcgattcgaccctgccttcctttgtcgaaaacattataatataatgccacaaatataggaaatatattccggataaaactcacaaatcgtaattaaaaaaatattgtttggttaaaactttgctttttttgtgctttttgtaattataaataggaagaaatcccggctgcgggcatcgcaaccggaacatttggaacgctgcaccgaaatccggtttcgggtacggcccgtaacggctcgcgcgatttcgtgctaccggatcgaattcatccggatactggccttgaccagggcgagggcccggatgcggtccacggccacctctttgtcggcgtgatgggggttctgactgacgagtttcacgtacccttcccgctcggatttttggatgtatttgaccgtgatgtactcttcgccgtcgatgtcgatcgagagcaggtacatgtcgccccagaagatgtcgccgatatccttgagctgtttgtaaagtacgatgtcgccgcttttgagcagcgggtacatcgagtcgcccacgatatagatggcaccgtcgcacttgggcaggttggggatgtggatgaaattgacgggccgcgtctgcgcgtgatcggcgaagagcggcaccaggcccgccgtcccttctatggagtagagggggacgctttgcagcggcagcgtgttgtccgtgcggtgcatgtaggcggtcagatcgggttcggcattgaacatttccccttctccgccgtcgagccagtccggattgacattcaattcttgaaccaggatgttcttgttccgggacgagagcgccgccttgcccgtttcgatcatcgaaagggcggcctttccgatgcctaatcgttgagctaactgctcttgtgtcagacctattgtctttctcaatagttttaagcgatcccccgtcatatcgtatcaaaattttttatggtaaatattttgattctcttgtattaaattcaaaaattgaacttatctttgtcttgcaaagttaaacgatttattttgtttatgcaaaatttttattgaactaaattcttttacgatgacctatccaattattccggagttatacggtatcgtcgctcgcaagctgttggatgaaatcggggagaagagtttctattccggttcgttttcattcgactacggttcgaaagagtgtcgtttcgtcgcctcgatcgtaatctatcgttcgaaggagtgtctgcccgaaggcgacgccgatcgaatcgacgacctggttcccgtctggtgggaattccatacatccgaccaagcgggggaacgccccaacgatttctccttttccgagcttaaggagtacctcttctgattcgactccgcaagatcgcacatcccatccggagcggcgcctcctgcggtctttttccgaacacattgttcttggttttcgatacccgctgcaacgggcggttccgtttttccgttgtcgttcgaaaagttgaacgctgttctgcgattgtcggatgcggcgattctggaatccggccgacccgtgcgtatcgaaaccctccgcctcccttcggcagcgccgtgccaccgggcggagcttaaaaactactgacctatgaatatagatgtattgaaggacttgtcccccgcagaaccggcttctgcgggggatttgcctccgttcggcctgtttgccgccggagtctatccctttctggagttccggtggtttcacgaggcctactaccgcgtactggaggcattcgccgccgggcgcgtccgccggcttatcgtcaccatgccgccccagcatggcaagagcgtcggggcttcgaccctgctgcccgcctacctgttggggcgcaatcccgatctgcggatcgccatcgcctcctattcggcttcgttggcttcgaagttcaaccggcgcgtgcagcgtatcatcgattcgcccgaatatgcggcctttttcccggaaacgaccatcaagcggggagccaggcctccggagtacctgcgtacggctgatgaggtggagatcatcggtcaccggggcggcctgctctctgtcggccgcgagggggcgctcacgggcaaccgtgtggactgattcattctctacgacctttacagaaaataatcaaaattgtcgcaaactaactaatgaacgaaaaaatttgccttgtttttaatctgaaattttatgtataagggaaaacgccgcattttttcggccctttctccttaacctttatagatacgatgcaattcaattccaccgaattattttacaaactgcatcagatagttttcgcaaaatcccgctaacgggaatttcactacctcgtcccgtccgtcgggtgtgacgtattggaataggattgtatcggctttcacgtggtagtcgaacaaattcaccttttcgcccgttccctcgatttgtgcctnnnnnnnnnnttcgttaagttcgcactttcatccaaatatgtattgtcggttctttgtaaggacaatttcgacgggctttgtaatgtctgccatattaggggcaaacatgtagataaatgtttcgggaaatatttcgtctttgggttttcctacaagcaggactattccctctgtttggctccatttaaccgccttttggattatctgcttatcctctcatgcgtcggtctttcattctgttttaggttgtttgtatctgttcattttagctaaaatttgattgttatttatctttataaagataagattattagcggaataaacaaaataagaaagtgacaaactctgcaaaagggtcttatagattaacctttttacaaagtctgtcactcaatttacaaatcagtgttgcccgaaatatttgtcaattattgcatatattttagcctctaagattttatcattatcatcataaactatcttattgccttttataactccgagtgattccaactcttttagagcctttggcccgtttatttttccctttagtccgaagaatattaaatcaagagttttcataaaatattgagcttaatttaatgctgtaatatttgtaaaattcttccactcatttgcttgtttatatgcctcaatgctttcctttggtaccgtcaatatggtatatgaatttaattctgagaaagcatcaatgccgcaagtgggtggaatcattgtaccaaccttgaccgattgcagtttagaacaatgataaaaggcacttggttcaattgattctatttgcgagcaattagaggcatcgaatgtcgtaagatttgcaagtcctctgaaaccaccgctacgataatagcggttatatccgttaggactgtgacctacatagattttttcgtaactgccttgaatgatttttaattgcgattcgtgttcaaaggacactgttattaaagcggaacaccccttgaatgcagcagcttcaatcgtttctacgcttgcaggaatttcaatggaaatcaacgaaatgcaatcagaaaatgctccgccgtaataagaatagtcataggttgctccacatatcgtttttaaacttgagttattctcgaatgtgacggtcgttagagctgtgcaatttttaaacgccgcttcttcaatgatttctacatttgcgggaatctcaatggaagttaatgccgtgcaatttgcaaatgctccataataatatttctctccatggctcaaaaaaccttttcctccgcatatttttgtcagcatagaaccttttgaaaaggtaatggttgctaatgatgaacaattcatgaaagccgctttgtttatcgcctttacactcgctgggatgttaatggattttaatggacactcgtaaaatgcatattctcctatcgtttccacatttgaggaaattattatcgacttcagtgaattttgataaaattcactgtcgttaatgatcgttaatgtatgcggtaatataagattctcaatggttttcattttataaaaagcctttgtcggaagctctgttaggttcacttcttcaagatcgagattctttaggtttatcatattctggattgtcaaaaaatcctcggcatctaattcccctattattttcatggaaataatagattcgggatttaattctttatcaaccagtacatcagataatcctcccttttgaacgacatgaacggttacataagatgccgctttttgattgatgatgattttttctgaaaggctatattccgtatttgtaaataaaatctccgcacttcgagattgattaggcgaattagtagctattttaaaatattttgtatgtgtcgagatagcccgtgtccatgtttcttttatccaatctacatcagatggaatcgttacttgaaaatcaacattgctatttatttccacctttatcgtttccccatcacctgaaacatcgtatttattttgtgtcagtacaatagtaggctcttctcccgcttgataaatagttatggtttcggacaatccgtcgctaaaaacagtaatcgttccttcccgcttttcaaagtctgtattttgggcaacatcaaatgaaagcattgttgtctgaagtgcgcgagtttccttgagtgttacccaatccttgcagtcttttcctatttcatattcatagtcgatattggctttgacttcaactatcgcaattcctccattggagtccatttcaattttggacgatgtaacagtcaaggcatccttttgtttctgcgttacgacaagtttagtcgaaaccgatccacatgtaaaagtaaacgttgcatttcgttcatctggatcattattctctgttacctcgaaagtgatttgttcgttgtctcctccactcgttttagatgccgtacaccaagattcgccgcccgtcagtttccattgagcatttgtggaagttccgctataattgagattaagccaaacagtttccgatcctcccgttgattcaaaggtcaatgcgtcgggggtcagccacattcctgttacggatgattctggatttgggttggggttgtcttctgtttcgcttttcgagcaactgcaaatcatcattgcagtaagcacaaataaaaataattttttcatagtaagattatttaagttgaacaagtgtttcaagtcttaccgtatcaactcctgttgcggtgggttatatgcaaaaagaaagtgtggaactgcaatatatgttttgatatgtgttcgggaaactcgaaaatgaaaacaaaagcataataactgtaaatgtaaccgctaatatacagtgttttatgtggtatcagattcgggattgacatcttaatttgttttaatccgtttcaagtttcttcgggatatatgggaacatatacgggaattattgtacctttgcagagtaattcaaaaaacactgccgatgaaagtttccgtatatctgaaaaagagcgattcctcgacctcgaacatctgtttccgggtcagggagaagaacgtggatataaaggtcgtctctccccttgccgtatatgacaagtattgggattccgataccctcagttacaagcgcactgcagctgttcctgccaccgagcagaaacggctgcccagacagattgcggccatcatcgagcatgttgaaaagaccttctcggacaaggcagacagcaaatggctgaaacaggccatcgaggatgtgctgtaccctgcccgcgccttcgaacgcaaccatccgaacttgctccgccgcatccatgaatatctagtaaagtttgacggtgcggacaggacgaaggagcatatcatccgtttcgagcgcaagatgtcacgttaccatgactatcaaagggagatattgggtaacacagacttcatgctctttgtggagacggtcacactggaacagatgaacgatttccgggattatgtcgtaaatgaacatctgttgcaacaggagcatcccggcttctatgcctcacgcctgcttgtcaaacgcaagcccaagccgctttcaggcactaccgtcatcaacatcatgaacctcttctgtacctttctgcactggtgcaagaagatgaagtattccgacaacgaggtctatgcgctctacggctgcaaggagccgacctacggtgatcccttctaccttacatccgaagagaggaatattctttataatgcagacttgagtgactgcccgaagttgtccatcatccgggacatattcgtgttccactgttatgtaggctgccgtgtcggagacctttaccggctgacaagggacaacatcaaggacggtttcctagagtatatgccgcagaagacgaagaagtgtcaggcgaagaccgtcagagtacccctgcacgagaaagcattgaagatactggaacactacgataagaatgcagacaggctgcttccgttcaaaacggtgcatacctataacttgagtatacgggaactgctgaaacattgcggcatagaccggatggtgaccatccttgacacgcacggctacaacaccgtgcagagacctttgtacgaggtggccagcagccatacggcacgcaagacattcgtaggcaatctgtacaaacaagttcccgacccgaacctgatagcttccctatcgggacacgtggagggaagcagggcgttcagacgttatcgaacgattgatgatgacatgaaacgcaaaatggtagagatgataaactaaggaggacatatatatgaaagtgacggcattcatcagaaaaacatcggccaagaacaacgtgacgaatctggcacgtgtctatttccgtgtccgggacatcggcggagtggacatcaaggcggcaagcgagctttccatcaaccccaaccactggagcgcggagaaacagggctacaagccccgtgtggcattggtctcggaggaaaagcggatgaacttcgaccgggacatccagcagattacgcaccttatcaccaaggaataccaccgcggtgtggacggcaactggctcaaggggctgatagaggaataccaccatcccaacatcaacgcgaggggcggcaacaaggcagacgaatacctgctgtcgttccagattaagaaatacatggacgaaacacctcttgccgatgaaagttggaaacaccaccgtgacaatctgaaaaaggtgctgcgctacgagcgtttccgccatgaagtcatgcaccagcgaggatttcacctttgcattgattccattaccgctgacgacatccgtgacttcaagttctggatgcaggaggagtataggtacgtggaaatgtaccctgtattctataaagacgaattgcctcgtgatgtgacccaacaacgttccgagaacagcatgtcaggaagcctctaccgcatccgtaccgtcatcaagtggtgcatcaagcgcggactgacaaggaacaatccgtttgaccagtaccagattacacaacccatgtatggcgacccgttctaccttacccttgaagagagagacaaggtgtattatgccgatttgagcggaatgggtgccacctatccggtctatcgtgacatatttatgttccagtgccttatcggttgtcgtgttagcgatttgaacaagttgaccaaggcgaacatcgttgacggctgtgtggagtacattccgcagaagaccaaactggaacacgcgggcacggtacgggtaccgctcaaccagaaagcattggatatattagaacgttacaaggaactggaagatgcgctgcttccaaggttctcgcatttcggttacaacaagaagataaaggaaatcctcaagtatgtgggcatcgaccgcatggtcagagtcctcgacccgaagacacgtgaggatgtggcaagacctttatatgaagtggcaaccacccacacggcacggaagacctttataggcaacctctacaaacaggtcaaagacccgaacctgattgcctccatgtcgggacattccgaaggtagccgcgctttcgcccgataccgcaagattgacgacgagatgaagaaggaactggtcaacctgttggattgatttggccgtttcctcatttctatccccttttatatttaacccgataatacagcatgaatatggatgaacaacaactgacctacgaacagttcaaggaggacattctccggtggaagaacacgcacagggaggaatacgtccgtttcgcacgtctgatgacaaacggtgacgagaagcagtaccttgccatctgccgggccatattcagacaactgcccaaaatcaaaactgaatgggaactgtgctggaacgatgacagtgcggagaattttgcaaatatagacctgcagttcaaggagaatgcagtgcccggacagatagttgagctgtacaggaaacagagggaagagagttcccctctgcctgatacacctcctaccacactttggggcagaatgaaatccttttttagcggcaagtccaaagatccgggtataaccctgtcggcaccgcttgtgttgagctggctgtattacggcaagagcttcgaggcaatggtcggcatggtagacaggcagatgaagaacccgaaagcagacaaggcggacaaaatgagctgttcttttgtcatcagacagattatagatgtgtccatcaagagcggtttccgtacccagaccgactgggacaggtacttttccatgaacgaagccattgaaaagggcgatgtcggagagtgggcgttacagtccgtgacagaggaaatggacagcggaacagaggaaggacataatacaggaacagggcaaacatctgacaatacccagactgttgatgatgcgcaaaaaacacgcggacgccggaaagcgaaagtacagccacttgtagattatcttgattgtaacgacaaagatgctgttatcggagttatccggaaattcatctccaaatatgatacggcaacagagcaggctctgacctattatgccctgaatgagcttgggctgttaaccaacatgggtagcgcaaaagaatttgcagcagctcttacctgtcagtttgaagacatgggcggtataaaaagcgaaagctcctatcggcaggccatccacacgctgacgacaacgcaacacgtcgcaaaagacggagtgaacaaaatgtgcgtgatgattaatggcgacatttgccagaccctgctggacgaactcaaaaccgaccttatggaaactcttcccaacccggacgaatcaggtgaaactgggtaaaataaggttgtttggagttgtcagaattgtcttttctgtcatgacaaatatgccaacttatattctttcaaccactttcaattccgatatacctttgcaccgtcaatccttttcccgagggtcgacggtgcttctcttttataagccatcggaagcggggcatcagggaacttttgaagatggtcgtcaaaaacttcaaaagctgatagttatgattacgattgaaagtctagtcgaacagggagcgaacgtgaaactggaagtcactcccacagaccttaaaatgtttgcggaatccatcgtgcagcgtaccatcatggcgcagcaggaagaacacaaggcagccatgcagcgtgaagcggaagagggctggctgaacacaaggcaggtccgtgagttgctgaacgtgtgcgagggtacgctcaacctgtgggcgaagcgcggttatcttgtccccgtcaaggtcggcaacaagaacatgtatgccaagtccgatgtgcatcgtgtacagacgggaggcaagtctgagagtgtaacatcctattgcaagaagagaaatggctgagatgaagaacacccggcttgaactatgtaacagaatccgtatggaaacggagcataccgaagatacgggattccccttggatgtgtttccccagaatgtgcagtcaatcatactcgatatgaccaaatacgagaactacaagattgagttcatcgcaacgtccatgctgtcggctgtgtctgcggccttgggcggcacataccgcatccgcataaaaggcgactggcagagcaacggtacattgtatgtcattctgataggcagacccggactgggcaagaccccaccgttggaggcggcattccgtcctatccgaaaacatgactatgccctgttcaaggcgtatgaagcagaaatggaagcatggaaagcggcaggagaaaacggaaggaaaccagttctgaaacgtaccatcgtttccgacttcactcccgaatcgcttatgctgacccataataacaatccgagaagtgtggtcattctggtggacgagataatgggcatgttcaattctgtcaaccgctacacgaacgggcagctcatagaacagctgcttaccgcatggagtggcggggctttggacgtgacaagggtaagtaatactattcctgttcatatagaacatccgtgtatcaacatcatcgggggtacacagaccaagcgtgtgcatgaacttctcaggaaagggttcgaggaaaacggactgcttgaccgcatcctgttcgtattgcccaaatcccccgaaatatcgccatggataaaccgggacgatgacggagaaatgacatctttggccgctgcacgctgggagcgtatattggacaaggtgtttgccttggaatatgatacagaagcggaagagagaatgcctcgtgtactgtctatggacagggaggccaaggaatacttcttctcttggtggaacaggaaagtggagcgtatcaatcggatagaggatgatgtcgaggtggacagccgggagatgaaacacccggtacacgtggcacggctggctctgataatccaagtcctgcgttatgcttccgatgaaagccatcttcagtttgtggatacggtatcagttaaagccgccatacgtctgaatgactatttcgaggattcatatgtccgcatccgttcctttatggcgaacgacacctgtgaagagccaccgaaggtgttgctgtcgttgctgcctgatacttttgatacaaagacggccattgccataggcaaagagctacagggtatcagcgagcgtactgtgatgaactatctgaaggagctatgtcacagccggcttcttcggaaagccaaggccgggcattatgagaaaatcgtgtatgaatccggcaaatattccatgaatgaaaatgaataaccaaccaaagactgcaaggaaatactccctgttgcagcttgcagttttttcagtcttgcagtttcggggcattgaaagcggagaatccctgcaaaactgcaaggactgcagactgcaaatggcctttcggcttgcagaaatcaaaaagacagagctatgagtgaatacagattccatctccagaaatacaggccgggtagcaagaccgtctgtcccggatgcggcaggaaaggctgttttacccgatacattgacgaggaagggctggtttcgtttcctgacaatgtgggcaagtgcgaccacatcaacagttgtggctatcattatacccccaaagaatattttaatgacaacctcgctgtcaaggaaaatttgaccgggcaagacagatatggcaatgttataccaacggttataaaaccggcaggaaagccatcacccaaaccccaacctcagatttcttatattccctatgcttgggtggagcagtccatgcagaggtatgacataaatcctttatacggataccttaccaccgttgcaggcaaggataagacagattggttgttcaatctctacaaagtgggtacatccaagatgtggaacggggctaccgtattctggcagattgatgtcagcggaaatgtccgtgctggcaagattatgggctatgatgcaaagaccggacaccgtgtcaaacagcccttcaatcaggtcagctgggtacattcggtgagaaagataccggacttccacatgaggcagtgcctgttcggtgagcatctgctggcctatgcttcatctatggcaaggactgtcgccattgtagaaagcgagaagacggcactgattgcagcactgttcatccctgatttggtatggcttgccaccgggggaatgcacggctgtttcaacagcgaggccatgcaggtgctacgagggcgtgatgtgattctcttccccgacctcaaggccacggatgaatggcggtgtaaggttcagatgctgcaatccgtttgtaaatctgccacctgttccggactgttggagaagatggcgaccgatgaacagcgccgtcagggactggacattgccgacttcctgctgatggaggatacaccacagatgattctcgcaaagatgatacagcgtaatcctgcgttgcagttactcatcgacgagttggatctggcattggtggagtaatccgaagtcttgcttcgggagtttgtaagaaagtccataacacaataaggactttttgcctgacagcaataaagtccctcgggcattcggcagaatccggttcggagcgagcaagctcaaacgtcaatcatttatcaaaagaataccctatatgaataaagatataaaacaagccatgcatgtcgaagccggaaagtcattcggcacggcagagaccaatgagaacgaaagacgttggaacgatgacaagattgacaggaagaatcaggagccgaccaaccactacgacaagaccagaatgaaactgaatttcgagattggtcctgacgggaaagttcatccgttgggttatcaggagaaaccgctcgaagtacgtttgcaggaacggttggacgagttaaactggaagccgttcaagtcgaacagcaaaatccagccgaactgttgtgcgaaattcgtctttggaggcaaccatgaccggacgcttgaaatggctttcgggaatcagtccgtcaatctggagaaaggtgcggacaacagccatctgcaccgttgcgatgaaatcgagaattgggcgaaggatgtctatgactggtgcgccaaacgatacggacaggaaaacattgtcgggtttcaggtacatcttgacgagagcagtccgcatatccatgccttggttgttccggtaggtatccgccccaagagcggacgggagtgtgtgatgtggtcggcaaagtttgggaaagaccgctatgaatatggccggatattgaaagatatgcacacttccctgtatgacgaggttggcagcaaatacggacttgaacgtggggacagtattgatgggcgtaatgtgcagcatctgaataagcgcgactatatccgcaaactgaccaaagaggcgaaacaggccgagaaagccgttaaggggcttcaatctatgatgcggaatctggaatcaaagattttcaagtataggctgcaacttgaagaggcggaaagggaactggcttccggcaagattacactcgacaggtatgagtcgcagaaagcggatatccagaaactcattgctgagtatcagaccaaacttgaagacaaggccgacaagctccacgcaaaggagctggaactggaacggctgaccgcagatgcgacaaaagcccgttcggttgtccagccgttccgtaatcacaaggttgatttcacgccaccgcaaattaccgagaaagtacccttgttcggtacggataaatgggtcgaacgtcagaaccagcatatcgccaagcagtttaccgaaattgttcgcaagatagaatccctatatagaaatgatgcggcacggcaggttgaagccgcccagcgcaatgtattggcggattatggtgagttttatcagctgagacgggagaacaaatccctttccgacacaaatgaaagtttggaatcagagctgaatacgcttcttgaacagttggctataccatctgttcgcaaccttatttttgccgttgccgatgcacttatcggtggccagcctgtaccgatctcctcaggtggaggaggctcaacctctgatctgccttgggatggccgaagaccggatgaggaggaagaagcgtatcggaggaagtgtttgctttatgcttcacgaatagtaaaacatactaaaattcgaagtagaaatagataattgaacaagcacttgcatatcagaaaatggagcaaggcatttctccattttctgattatatttcatatatatatgccaatatggttagatgttacctcgtttactatgtatatccaaatattaattaaaaagactcatctctccattttctccttcgggatgtacttttttccatatagcatcatttaaactttttatctgctcttgttcttctggggttatcccttcaccatattcacattcgataggctgtccatcaagcagggcggcaatcattttgatgtacgagaacgcctcctgctttgtgttatcaagaattacagcagcaatatcaccgtcttctgttttattgaatttcagtttcatatttaattgtattttttaaaattatatttcttgactctttttttgattgatgtcctgccaccatcagtctgatcagcaatatagtccaatactttttgtccgaagacttcgctttctaatgacgcagaacgaatggttattttattaccatcgttttcacaaacaacaattgtttgggcatctgccatcattggtattgttgcattgtggcttaccataatcacttgcttactccattttacagctttgatcgtttctgttaatgtcgagtttatatactttacagccaaattatcctctggttggtcaataataatgggcgcagtatcttgttcatatcctagtattaaatccaacaaaattgccgttttccatccaggactcaaactgttaaaatctttcccgtctttcgttataattttatacgaacgtgtatttaactccattaatttcgtatataccctctgggtcatatcgttgtatgattcgacattgggatttttcttgaaataacggctcatcaaattccacggagtaacatctgcaatagtattgatattagactttaaacagtatttcaatgcatctactagtactttctcgttaaaaataaagttattaataacagacaatttatgtcctcttgcttctatttctctagtctgaaaagaatattttattttaatcaactcttgtttacaatgcttaaaacccgtaagaacttttatatattcacctacagttttaagtaaactatccttgtttgtgatgcgggattgctgctgtccaagttcatctttcagtattctatctacaacttgtttatgttcttttacgaccatagacacatcatcaaacatagtataggcttttgcagctaaggtaagttttgtttttatggagttaatctcttcatttgcatcttcaatcaaaggattattctctaaaaaagttctaatagtctctattgcttctaaatcaatcttatattgattcgaaggatacttaacgagactttcttcttctgccgttggcatcaatatattcaacgcatttttcttcacgatgccagtaacaatcaactgccctggattaggtaatgcattcaaggttcgctcgcagtcctctattttctccacgtactgcaacatttcactaattacctcatgcaatttatttagacccgttgtaatactacgattaatttcatcgtctgcaggaaaaatattccttaatatctctattttatcaatacttttttcgttattatccgagatgttttctgctatgaagttttgagatatataatatggggtcattccacttgtattctctacaatcatattctccacaccataacgctctatatacttcgagccctcaaaatcctgatgaatatttctatataatgaatccacaaataaagttttcccggatgaagatccgccaattacgacattcagaccttcggttaagtttacattcacatctatatgttcattctgcaattctacatgcccaatataatcacttcgtcgtattggtttctcatgactagccacaagtcttgtactttcagaaagcgaaagtcgtaatccatcaaatgttggttgcgcaaacatccatgttgggatgaaatcatcatcattcccgctatgcgagcgaggatatatactgggagaatagttgtcagagcaagtcacaagattaatgaactccgatattccgagtcgttcaaaatattgatgagttgcctccagccctttggtacttcttgatgtaaaaccatcaaattgattataatatatacttctattgatagcattatctaaattttcaccatcgttgatgctataattaaatgctccatgtttttgtgagccgtgtggtagtaagatgaaatcaaatgtgtcaaaactattaatgattttttggatatctggcgtattggggtcatttcggtcaggtaatttatttggatatagttcatctagaatctcgtttagcgaatctatcacagcatcttctataggagcattaaaatatatatgacaatggtacgattttgcctcagcccgattttgaatgtgtaattctacaccaataattaagttaaggtccaggttttgagccttcaaataggcagatttgttaatggtgttgtgatctgttaacgaaatcataaacggactgtctccatttagtttctttatttggccgaccaattctgctatatcgtagttagtattcagattatttgcattctctgaagtatgtatgtgtaaatctatgtatattggttgcatgtctatttgttctatttatattattcatgtttcttataattctctacctgttcaagaactttctggaagacttcttcatcccattgaggaggataaccctctttgtagagaagatatgtaagctggctggcgagtttgctttttaggttgtcgttatttagccaatcggcatagacagcggtatcatcaatcagagtcttgattttctttgccaactcaatacaacgctcatccgcatactcaaaaccatgtttgtcccgcacctcgacaagtacatcgaagaaagctttctcctcaaaagtgatacccaaaaccttgaatttctcgctatcagctttaagctctttcagaatgttcatcagtttgttcgacaacccattgattttgtatgaaacaatgtcacatacatcattcactacgttttgtgtcacttcattggtgaatgtcaacttgtcccttgtattataggcatctatcgtatcttcaagcatcttttggaaatgttcggcttgtatcttgtttgtccggctgtatgctctgattgctttggctacgagtttgcagaggatttggaacttagtgaatggcatctttatatcttccacctctttggcgaatgagtcgctaaaaatattctcttcaacaccttcattcattactcgttccacaccacttgcaagaattgcttcctgaaccatctgttccacatgcctgttcatgctttccgtgtcgtgctctgtggcagtcattttgtttacgtatgagcatatacccatgaagcattgactccatgctacctcttcttcagtcagaataccggcagggttacagatattataagcagaacgcaggcgtttaacatgttccttgaaaagtttgaggaaagaaacctcacctttccgttcaacactgttggcaaggatatattcagccgctttctgaatgaactgaagtcgggcaaggtcattgttcccgaaaaaacggtcgaataccaaccctgacagtctctcttgcaaaagttgcagttcgttttgcaatacttcatgtgcaacatccaaatcttcctgtggtccgacttcgccaccatattttttcatggcctttttcatctcttcgcggatgccgatgtagtcgatgataaagccacactcttttgtgccgaatttacggtttacacgcgaaatagtctgaataagcgtatgtttagatagcggtttgtcgttataaagcatggtcaagcaaggcacatcgaatcccgtaatccacatatctacattgatagagatatggaaatttgatttttccgatttgaactcagaatcaagaaatttacgatagtctttgtctccaagcaaattgtaaagttccttttcatcgtccttatccctggtcataaccatattgacaaatgcgatgtcattcagcttattcttttcgtccgctgtcaatacaagttcattcaatgctttctttttctcgaaccattcgggctgcatctccctcatgattttatacagcctgaatgctatcttgcggtctgcgcaggtaatcatagccttttgcagacggtctgttgtttcagttcgacgcttgtaatcttcgataatgtcttttgcaacacggcgcaggacatcttcatcaccgataatcacctccatacttgacatggcagctttgcttttggcaatatcctccggcgttgcaccttcatcagcacataggcgataatactcttctactttctctgcctgttctttattgaggaacacacgagccaatcgagggtcatattttattgggacagtaatgccgtcatcctccgactccttcattgtatattggtctacaacctttccaaatacatgtatggtttcgtcaatgggagttccagtgaaaccaacataggtagcattcggcaacgcatcgcgcaagtatttagcaaatccgtatgtgattttcgctcctatcttatcggcttctccttcggtttgtatggatagtttcgatccgatattgctctgagagcgatgggcttcatcacttaggcaaatgacattggaacgttctgtcaacaaccctgtggtttctgcaaatttctggatagtcgtaatatagacacctccggttttacgcgtgctcatctcttctgcaagttctttccttgtctcaaagactttcacagcttcgtcttcaagatactgcttcgaacgacagaacagtttcccgctttgtgtctccaaatcctcccgatctactatgatgagaatcgtagggctacccaattgcttcttgcatcgcaaaaccagttggcgtgcaaggaacagcatagtataagttttcccacaccctgtggctccgaaatatgtaccacccttgccatcacctccgacagaacgcaaatgattcaggatatggtctcgcagtttacgtgtagcaaagaactgcggatagcgacatacgatttcagtcgtgtcatcttcttttgttggatcgggaaaatagacatagtcccgtaatatctctaatatgcgttccggtgaaagtgccccgcgaatgagtgtgcgaagcgtgtcaagtccctttccggctttgtcttcattctcaatctttttccattcgtagaaaaattcaaatggcgtgtatatcgtacccaaagcattctttgctccgtcactaattaccgccaatgcacaatatttcagcaatgccggaatatcccgcatatagcgcgtgcaaatctgtgtatgggcatcgcgtatggtggcattctgcttggtcggatttttcaattcaatgatgcagacgggtatgccatttacaaaaagcagaatgtcagggcgacggttctcacgaccttgctccatgacaaactgattgacgcaacggaaaatattatggtcggggtgctcaaagtcaatgtattccaagcggaacggattatcccgaccatcactatatgcaaagtcgtagccgtcacgatagagcaaaaaagcgtttcgaagagcgtaatagtcattctgtccgcctgtattgcgcagattggcgacaatgccgtctatctcggaggtggtcaaatccctatccttgtattgagcggcaagaaaatttcttaaatcctcttcgataagcgggtcagtatatttacggtggatgtcatcaccgaatgtatattgccaatgtgcttcgcggagaagttcgatagttgcttcctcgaattgactttcataatatatccctttgcctgccataatcgctgctatttaagaatgtatgacatgttgaagcaatgccggacaaacttcgcgtgaaagctggtcggcttcttcggctatttgtttggcttcgttagcgcatttgtagatattgacgattgctcgttgaatttcaatgggtgggagaggtatttttacacgacacatctcatcaaattcaaaaaattcatgcgcacttcctttggacatataacgagcatacctatcaaattcaggtcgtgatacccacatccacaaaaaatacggctcaattatgtcctcatttgtgattttgaagactccataagcggaagaaactgtacaatccgctccggttctatatgcaatggatattttctctccatttcttgttgttgctctattatatccgaactgtccagttctcacaatcttatctgatttagaatttaatgcgacttgtttcggtgcctgaaaaacttttgtgtttgcaataccttgagataatcgaactgacaaatcgacatttcgctcatcacactcttcaatatatggtcctatctcctgcaaaggatatttatgcttcaattcctgaatataactttggcagacttgcataagcggagctgccttagcctcattttgttctttgatttcccgaaatgctttccacgcattcaccactttttgctgttcggtgatggttggaagaggaatcattgtattgcacatatttccccacgagaacacttctcgtgcgcttccccaagaattatatcgagcatatcgatcaaattctggacggaggaaaaataggtacaaatattctggacttaatttgtccaaaacagagaccttaaatacgcaatatatcgaggaaatcaaatatgtacaagaactgtcattaaaagccaaggcaactttatctcctcgtcttgacgtgtcaggaacatatgcaaaatatctaggtgcaaccaatttatatgactgtaaaggtacaccatcaagattggctttagtatcaataaaagttttactggtactaatccctttgatagcctctataccatatttattactgtgattcctttcatcacattgctcgatataatctccgagcctgacccattttacattaccagcatccatatatcactcctcctttccgtgttgttccaagaagaaacgtttttgctgttctatctcccggctcagttcttcttctgtcggcatataggccatatatttggctgcaaacaattgttcactaccgttaagaacagaatattttgccatcaccttatcagtctcggtgcaaagcaatatgcctatggtcggattgtcgttttcatcttttacaaggtcatcgtacatccgtacatacatatccaattgtcccacatccgcatgtgtcagaggatgtgttttcaattcaaacagcacataacgcttgagcttgatgttatagaatacgaggtcaatgtaaaaatcacctgtatctgttgaaatatgtttctgtctatcgacaaaagcgaacccacgccctaattccatgataaattgttgcagatggtctattaaggcttgttccaactggctctcgtcatatttgctatccttgcggaagcccaaaaactcggcaaccaccggactctttatatactccaatggatcattggcttcaatatcgggagagggtaacgccaatccttcccttacacaagccatacggcgaccatagtattgtgtaccgatgttgcggttaagcgtcctcacactccacatctgttccgatgcttcttttacataccactctctggccttagggtctgcaacctgtataatcgagcggaagtgcgaccaagtcagattgtgaacacgcgtgttcacaatctccaaatcattgaagcacagataaaattggcgaaagtaatcgagatttcgcttgctgaacgtattgccgtatttaggcatcagttgttcggccaatgttttaatcaaccgagtaccatactgcgcacgagcttctccatgctgttcttcttccactatacgccgcccgatatgccaataggtaagtaccgtaatttgattggctgctgcgtatgcttgtctccgaccttgttctatgatattccgaatgtcatcaaagagtgtatcggttgttatattatgatgttgcaacttattcttttccataccctaaaattttgaaagcgtttacgagttccgtttcgtttgcatcccatcttttcttcagcgcattaaatttatcactcatttcagaaagagcagactgatagtctatttctgtatcgcggtcaatgaactcaatgtatctggagggtacgagggaatatccctttccctgaatttcgtcacgatgcgcagcatagtataattcaggctcggcatactcaacaaaattctcggtttgccaattgaaatatatttgacgtactctgtctatgtccgcttctgtcagacggacatatttcttctcgtatatattactgttccaagtccgcaaatcgatgaacaaaatctcacctgtgcggttgcgtagttgccttccgtgccacggtccgcctttcttgttgttgttcaatatccaaagagtgacggatatatcggtagaatagaacatgtttcgtggcaaaacgataatagcctctaccttgtcactttcgattagcagcttacgtatttcaagtgtatcgctgtcatccaaagccccattagcaagtaggaagcctgcaattccacgactgacattcaatttgttaagaatatgaagaatccatgcatagttggcattgctggtaggaggcactccatagccttgccagcgagaatcggtttcaaaacctccatattcggcatatttcttcaaattgaacggcggatttgccatgatataatcaaacttgagttccttgtgctggtcatcggagaatgtggacacagccctatcacccaaatggtaggagatgcctcggatagccagattcatctttgccagacgataagttgccggttctgattcctgcccatacacgttgacggctttcgtgtttccaccgtgagcctctatgaactttgccgcttgaacaaacatccctccggaaccacaacaagggtcataaaccgtcccgtcaaatggctcaataagtgaggcgataagctctacgatggaatgtggcgtataaaactctccttcctctttgtctgtgtttatggaaaaagcctgcaaaaaatactcatatacacgtcctatgaggtcgtggtcattgaatttctgagggtctatcttgtttatctcatccactacgcttttcagaactcccggttcaagggctgttttcgtgaaaatttgctgcggaagagcatttttcaatttaggttcgttgtcatccaaagtttttatagctgtatcgaaagcgatagccatgcctgttggtgatgtgagaatcagtttgtcccaaaacgtttcatctgtcaggaaaaacacaccgtcctgcatatattgattgggacgtgaaagttgcagctcaatgaaatccgtatcatgaatgccttgaacttccactatctcatgcctgattttctccttttgctgtttgaaccgttctcctatgaatttcaagaatacaagagttaacagcaggtcgcgtttatctgtcatggttgcacgcccacgcagactattacgacaattgaaaagtatcgtttcaagggtttcttcctttacagctttattctgtttcttagccattttactattttatcaattcagtattcaacttaaaagcatttgcatcaattcccatttggtaaatcttaatgtcaggatttaattttcgtgcaacgcttattatttttgatttctcatctgtatccatattgattcccagatagacagactcaaagcactctcctccgatttcaggaaaagcccgaacctctttccaatcaatcggacctttttcatcattctgatccggcaataaactcatatatgtcggccaaggatctaaaataaacagtctgacctcttgttcatgttcccaagcttttgcttttgtagataattgataacggaagaaatcttctgcatccctaaaataattaggcttctctacaatatccttgtattgtacttccacctcagaacaaccaatcatgattgttccttgtattatcgaaagatactttttggctttctccatatccaggccaatacagatccctttatgcttgctataataactccacatcaagattgaatcatagattttagaaaggctgcatatccacacctcttctctggttctacgaaatggatctcttctcaattcttcaattatttccggagtccatcctccacacgcttctttcggaacattggagaaatcaattaacgacgggtgacaatcaaacgggtcgttcaactgcgtagcattggtaaattgaagattactataatgtagcatcatcaatccaccggtaaaatctagatatttatataatttgactgcttccataaatttattattccgttctcaacaagtcatccacggttacacccaaaactttggatatttgaatcagcgtctctacattgggttgtgttgtattggtaacccatttggagattatggcaggatctttatccaattgttccgagagccatttattacttctgtttttctctgcgagaacgactttgattcggttcagtaatttacgctccatatttatatgactatccaatatggttacaaagatacaaattatatgggaatatatttgatttatcaggttatatattgcagaagaacacaaaaaaatgattaaatcatcaatttgttctgcgaaattcgtatctttgcaaaaaactatttggatttatggctacaggaaatcttatcaagaaaaaggaagaattcgaattatggttgaagtctcagattgcaaaaggttgcgacttgctaaaacgtgaagttagcgaagatgacacaaccattgtgcgctacagaacgattgttaaaataaaggaatatgacgaagatgagaaaaattcatttcttgcagattataaaaaatgggattcatataatagcgaattgataagccgttcttttgacgataacgattcgcctcaatcctattatagagtatatggtcgtaccggagatccaacaagattatttggtgaagatattatcaaagaagctaagcaacaaataaatgaaaaagttgtctgccttgagagtataatgggtcaattacctttaattccacagacagcaccaaatgataataatgacagaagtgtaaaagttaatatgggaaataaagatgtttttattgttcatggccacgatagtggattgaaaaatgaggttgcacggtttataactgatatgggttataatcccattattctgcatgaacaaccgaatacaggtaaaacgataattgaaaaaatagaagctttcacaaacgtttgttatgcaatagtattatatactccgtgtgataaaggagcctcgaaggattgtccaaacgtacagccaagagcaaggcaaaatgtagtttttgaacacggatatcttataggaaaacttgggcgcgagagagtttgtgccttaattaaagaagaggtagaaaagcctggagatgttgatggtgtcgtctatgtttcatatgatggccgaggcgcatggaaaaaagatattgctaaagagttcaatacattaggaatgcattttaaccctaatgcattattgtattagtttttgcattaaaatttatagatagacttactctcgggaatcgaattgtctaaatgatatagttcatttgtctaaatctatatgattaaataattcatatctggttccaaatagagatgtgccccaaaattattgccgtctagtaaagtatagggcacatctgtttttaatgggaatattttggtatcgtttagctattgatttaaattaaatatactgtaattcaagaacttaaaattattgtattggttcaagtgtggagttgttcgcttatccacatagaggttctgacaaaaccttggtacaaataagcaaatccccacacttggcagtatatatcgggatgatatatagctacacaaatgaagagtgtctgtcttgcttactcccgtacctattgaaactgtcagatttctatgtgagagtaaacgcgaaacactttcacgttactaatatgttagttacctattcggtaacgacacaaagatagaaaatgtttctaaaagacagaacactctatggaaatttgctgcgcttttattgtgcaaagttcttgaaaacaaagtttctatccaatagtcgggagtatggaatcgaaactttgttagttgtaagttggaggataggtctgttgaactctaacctaatctcttgccatagagatatttattgtgtagcctatatgggcgcatcgaaatcataccaaccgttcattgccgtaatagtcccgtattcgggttctccggtcgccggatcgcataaccataccgatgcgaaaggaacgggggtaggtgtttccgatacatacacaaaacctgtgatctcctgctcttgtcctgccgcagaacttatgaagcctgccaaagcgaaaaataataaaacgaatcttttcatagccgttgaatgtttcttaattaaaaataagcattttatcgggaatcagacaaataattttcggataaaatagttgcgaaatcgaagaatggtaattttatttgtgtgatattgaactttttctatatcttatttgaatatatatttacgatggacggagttgcggagcaataaaaatatcgaggtatgacgcgaaattgcattttgaccgttgttttgaacaaaatgcagactttgtaaaaatgaattaaaatcggagaaagaaaaatgcctgatttttttcggctgcagatttcgataggatagggtaaagacaaaggcagccgataatcgatcgattatcggctatttttttgttatcctgctggacctaaaagtgatccagtcggaatcactcaatgagccgtcggagtcttcctgaaaatgccgcttatatgatattacaagctatattttcggatcgtggtttatttcagtctgtttcaatttgtaacttatcttgagcgtacttcataacgtggttatgtaatttttcgtttcttgtggtaggatttgattctattatttccggttataatcttgaaatacattacggaatgttttgccgcgatatttttaaacaatcttgatattgctgcttggaatataaacaggatggttgtataaagtcccaagtggatttttcaagaaggttaccgatcgactcgtttttatggtttgatatattaataaacattattgttgcatagtatgtgtcataagacaacttctagctatgaaaagagataaattgtcgaattgtgtttgcaatatttataattattattaaatttgatcaggaattgtttggtatttacatctttataatttttcaaacttataagcaatacagaatggtcatatatcttacttaaaattatctttctaatatttattgcttatgaaaaacattaaactttttgtaacattcgttgcttctttattttttcttttctcttgcgagaaagaaaaagttgaaacttgtggatttgacacgatcagactcacagagtctttcttgacagaatatgcaaagggagacggagtggacaactatatgatagctcttgcaagtggtccgacagtcttcgatccaacaaatcagcaatggcatactgaaaatgacggatgggtaatgcttattagtctgttcgcagaacctgttgccaatcttggggcgccggaaattcctgaaggaaaatatacgcttggaagtgctccgggtgcgggtgtttggagttctgaagaagatgtcaatcaactatactataccggaaaagacggtgttagcaccttggtaccggtaagcggagagcttacttttgccaaaacggcagatggatacataatgactggaaagtttttggctgctgaccagaaagaatattgcgtaacctataccggaactcttaaattccagccgcaaggagaaacttcggttattgatcagcctgtgaatacaaaattcataggtggacaggcaatatataaaggtccggatccatccttcggcgatttgggctgggtacaacttgaactttatgatgcagagccggatccggagatggggacgattttgggtaatttcttaaaaatcaagatgtttattcctattcagacagaaaaattcacgtccatgccatctggcacttggaaattgaatgcttctgctgatgaaaatacggcagaacctggatatgatagcggagaagaccttcctaccggatcatacgtagtccagacaagttcggacggttcgacaatgaaactcggtatgttgaaccaagggacaataacagtaacggaagaccagcatgttgtaatagatgcttacacaaccgaaggaattagtgtaaaaggaaacttaaacaaacctctcgaaatactggatcttggaggtggggaagtcgatgattctcaatattctactcttacaacagacaaagtaatagatcttagtggcgcagaaacagcgtactttcttgattatgaagattattatgagaacggcacacgaaatgtagtgcttcagatcttggatagtcagtcaatgacaggtatgtttcttgatctggcattgtcgaaagcagataatagatacgatccccttcccaactgtacatgcaccctcgatccgggagataacagggcgtttacgtttgcaggaggaagtatttggcagtcaaatgccgtaggaacctggggattcctcaagcttcaaaccaatggcgagactataatgcctgatttctcagaagcaggaaatgcagccgggggatcgcttaccattaccagaaacggagatgaatatactataacagtaaatttcattgatgacgcagaaactccgcatcgtatcacaggaacttggactggcactctgactccttattcatacacggcatccgtaagtggtttgttagagcaatcgatgaaaccagttaaataatcggacaagggatgttttttatagttagaaagattatataatatttcttattgagataaataaaagagtctttcaggtaggcgaatgaaaggagggtaactaattttttagttaccctccttgtttttacctgtattctgtctctatcgtaattgtgatacttgtgtagataaaaagatagcttcattttataacggctatggattccgattaccaatattcgacaaatgagagcgacttatttataaattcgttacggcttttatagtaacgaattgacagcgattcattttcacagggtgactttttgaggcctttttctgtcgcaggtaggtggaaaacatctttaaaccactggtttaaagatgtttgtcttggtttgtcagagtttttcatttctctgaagtgatctcgctgggatccgtttgtgaactcgatggaatcatcctatgatccgtctggggccttcctgaaaatgccgcttacatattgctataagctatattttcgagaggttggcttctttgattcggcttccacttgttgcttgtttctaacgtaggtcacaacgtggttacacaactctgtcgcttcttgtcatagaacttaataggggtatttcctgttataatcttgaaaaagcgatctaattttcttgcatcaacaattacctttcattaatagtaaatttccgatttgggggcagattttccgggttgggtaaatccatccggcgaaagagggggtggatcggtaattttatatcaaatatccgaaataggtggctctgcttatacgcatcatgccattggtatatcgctctttggattttgccgtgcatggaggtactgcaatcaacctttttcacaagaatatgccccggtattcggttgatatcgatctgcccctcccatacagaatagggaagaaagtctgagggcaataaacaggcactttgaagatctgaaagggtacattgaaaaatccatacccggaatcaggattgtacccaaatataatgtctggaaattacaatgtaaattggatggggctactgtaaaaatagaagtgaacggaccaagaggggcttgataggagaaacggccgacatgatgctttgtgataaagcgcagaaggagttcaatatggcttgtaaggcccggactgtttcttattccttgctatacggaggtaagatggcggctgcactaagccggcagcatccgagagatttatttgactgcaagtatatggaaaaaagtaacgactctgaaacaaagccgttacttttttgtcggggtacggaccccgggtgagcggagcgctcttctatttcttgtccttgtctttcttttccagggcataaagacgattcacctcctgaagtacggcgggcgtgatgtcgagcgtcgaatcggcgtcgagcagggcattggcattgacgatgagtttgtaacgaccatcggcattgaggttctcgatggcgcggtgcagcaggtcctgagcccggttcgaaaagacgaaattctcttcgtcgagcgctttggcttccttctgtgccgcagcctggtacgaagctatgcggcgctcgatgttctcctgtgtggattgcgcgtcgttggtggtgataagccccttttggtatttctcctggagctgggctacttcgtactggaagttctgctccttctgtgcccagctcttctgtgccttttcggtcttgtctttcagggcgatgccttctgcattgtaaagatcggactgcgcgagcacggcttcgacctgcacgtatgcgatgtcaccgccgcccacttcccgttgctcggttgcttcggtagctgccgtttcgacgtttttggtgccgcaggcggtaaatcctgccagggcgatcaatgccgcgaagaagagttttttcatgtgttatccgttgttttggttaaaaatatcgctttgaaaggcaaaggtagaaaaaaatctttacttttgtcaagccacattcaaaattagaaattcatgtacgaatatctctccggtaccatttccgaactcgctcccacccatgccgtgttggatgtcggcggagtggggtactttcttcagatatcgttgcagacatattccgaaatcgagcactccgaccgagtgaaactgttcgttcattacgtggttcgggaagacgcccagttgctttacggcttcgcgtcgaaggccgaacgggaactgttccgccacctgataagtgtctccggcgtaggcggcaataccgcccggatgattctctcgacctattcgccgagggagttgcaggggatcatcgctaccgaaaacgccgtccttctcaaaaatgtcaagggattggggctgaaaacggcgcagaagatcatcgtcgagttgagcggcaagatggccggcctgggactgacgggggatactgttacagcccctgtcgccggcggggattacgaggaggcgcttgcggcgctggtcatgctcgggttcgggaaagcggcggcggataaagtcgtaaaaatcgttgctcgggaaaatcccggaacttcggtggaggatctggtccgtatgtcccttaaacgattgtagcatataatcgtacatttctatttcgcagggtactcatatctttcgatgtatctttttttgacggttgcagcatcgaatccgagggtcgcttattcgcggtatgtgttcgcgtctgtaacgcggacctttccctaaatatccttctcgaaaggggcgtggggcgctacgttcccgattaattattacgtttttgtaacggccttcttgtttttgtcgatttaatatttttgaaacttttttttatatttttcttaaaatatttgggggggggnnnnnnnnnnnnnnnnnnnnnnnnnnnnnnnnnnnnnnnnnnnnnnnnnnnnnnnnnnnnnnnnnnnnnnnnnnnnnnnnnnnnnnnnnnnnnnnnnnnnnnnnnnnnnnnnnnnnnnnnnnnnnnnnnnnnnnnnnnnnnnnnggatttgcaggctttgtcggccttatgtttggtcttgttgttttatcggtcatcataaccctggtcgtatgtgccgttaagaggcatcgcagggagtggcttcaggacggacagcgtagagtctgattttgttttgtaaagttattggagctgccggagcgattctttcgctccggcagtcgatttttttgttcggttcgtttccggacgtttcggatggtccgaacattcggaaggtcggactccatatcgttttgtcgtgacgcgggctttcgtgtgcaactccggttctgtgtcgggagcgcaggaaaaccggccgccggaccgtcgggtttctttgccagagagggaaacattgtttttcgggggggtggcctgactgcggcgtctgcgttggcagtatccggcctcgcagtcgctgcagcggatttgcaatcacggttcgcggggtgtgtgggcgtggtatcgccgccgtaagcgatgcagtgtatagccgagccgcgatacgttcggggtgtaatcgtcgttttttatccctgtacgaatactaaaatcgcccggtctgccgtattgttaagaagagcactggcgggcgaggcgggcttcggtgtgtggagttgccgggccggggacgcgatgcgaatgattccgggtttccggacttcgggactgtccgagcgatgtcggtcgggaaaacgaagaatgaagcccggtaaattttgcaagtcccgcaggatttgttaaatttgcgcgattgtatgtcgaaaatccgtttccatattttgcttgctgcgctgttggttgtcaccggctgcggcgaggatgacaaggttcttcccgaacagcagcagcagttcgagagtttcctttccggcagccaccagcctcgtctggtgaccgagcaggaggctatgagttcggatgaagatctcgatttttactccacgttcgggcgctggtcgtatcgatatatttaccattattacgattcggaacgtcagacgcgtcctgaagcggagatcggcgatgaggtggatcttgttttctgggtctatctgttcgagaatcgggcaatcactgcgagtacgatgccgatctacaccaatgacagaaagtgggccgaaaaacttcaggagcagggactcgatacgaaatactggagtttcgaaccccgtcccgtccgtgtcggcggcggctctttcgtcgaaggggtcgaattgtcgctgccgggctgccgcgagaaagatacggtcgaagtatatatgacatacaatatggcttacggcgatgcgctgatcaatttcattccggagcagagtccgatcgccgttttttatacgattgattcggttcgtaaataagaaaacaatgaatagtatgggacgttggttgcctgcgatactccttttcggtctgacgacgctctgctcctgcgctgaggagcctgacaatgcttatccggggaatacccagaacaaagctctgaaagcctggatgacgcagaatcgtcccgatctgctggagaattaccaggaggaaggggagtattacgtggatgtcgtttcgctgggcgatctggcggacagtgcgattctggagacggagagctgggtgtggtacgatatcacggggcgggatttgcaggggaatatcagtgtggcccgggattccgtttatgcgcttcagcagggaacttttactccttatacacattacgttccttactatcagttctacggtgagctggcgagcggaacttttaaggaggggacttatctggctatgcggaacccgttgaagctgggtgaaacgtatgccgcgcagaagggatttccccgtgaggtcgaattgcgcgtgggggccgaggtcgtgctgtatatgcctgcgacgatcatatccaccgaagccaatggcgacggaggttacgaggggcagtatgcattgagtgccaaccacccgatgatcgcccggatcaagctggtcggaagatcgagtcagccgattgaaacggagagcgtcgcggtcgatgattttgcggcggcgaacggcggactggacccgacggttcctccgcaggacgacgattccgaaacggcttcggtcaaagccggagagccggccccgtcgtatcgttggaaaatcgccacgtcggaggcgcctcaaatctatgtgaacgagagtttcaatcctgcggacgatgcgaccggacttttcacctattcgaatgtttatgtgggatcgcagcaaaaggcggacgagatcgatcgtaagattaacaaagctttggtcgagcgcttcggtacggacgaaccgggcgaactgatcgatcccgagaagaatgtccgggtctggtacatcgcccgattcctggacgggttcgtacagagtaccaatatcgacgaggtgaaacgaatcgtttacggcgaggtggaatccaccggtacgtacatgagctacaccccttcgctgaataaggacaaacagattctggcctggtattacgccttgccgcacttccgctacggaagctggggcgctttgctgaccgtttcgagcaatgcgtacggtgtggtcggcattaccgggacaacccagaccagttcttctacgaattacgccgctacgtacgctatgatgaattattacggcatgatgaacaattactacggtaataattacatgggcaactattacgacgattattatggcagctatatgaacggtctttacggcggttcggtctataatccttactatgtagacaactccacatcgaccagtacgacgatcaccgaggttttgccctatacgccgctgttgatcgaattttatatcgagccggctcaatagtccgttgccggttttgttttctggccgtctgcaggattcctgcgggcggcttcggtttttattctttgggctgcggggcttttcattcccgactcattcccggcattggatttggaacatttcgattgtaagacggattctgtcggtaaattgggtgtaattgacgattttttcaactttttgttccggaaaattttgaaattatcggaaaaggatttaatttagaggaaagaaaaagaggccatctccggtctgccgacaaatgggtgccgaacagggtcggactttgtcggaagcggagaagacgaaaaataaattcaacctaaataattagcagtatgattatcacatttaatgagttgcgtcgtatcaaggacagactgcccagcggcagctcgcaacggattgcagacgaattgggaatctcggtcgattcggttcgtaattatttcggcggacggcaccccgaggcgaaggaaggcgtaggcattcatatcgaacaagggcccgacggcggcgttgtgacgttggacgatacgacgatcctggatgcggcgatgcgtattctgaatgaaaaataggatcggaatccccgattatggcaccccggctccagaggccggggttttctgttgcattccgtatcgtcgtgcggatcgggggcaggcaggctgcgaaatgacagcgatgtccgaaagggagtttcgggctgacattgtgacagtcggaatgtcagtccttccggcggtttgtcagattttacgctccggaaaagcaggatggtgcgaaaagaacatttggtacaacctttgttcactaaacgatcgtccgcacggcagcggcagggctgtggaggcggagctgaaaaagaaattattaaactataaagcaacgatattatggcaaagattattggtattgatttaggtacgacgaactcgtgcgtcgcagtaatggagggtaacgaacctatcgtaatccccaattccgaaggacaccggactactccttcgatcgtcgcgttcaccgacaacggcgagcgtaaggtcggcgatccggccaaacgtcaggcgattacgaaccccaagcgtacgatcttctcgatcaaacgttttatgggcgaaacttacgatcaggtggcacaagaggtcgagcgtgcgccttataaggtggttcgcggcgataacaatacgccgcgtgtggatatcgacggccgccagtattcgccgcaggagatttcggcgatcattttacagaaaatgaagaagacggccgaggattacctggggcaggaggtttcggaagcggtaatcaccgttccggcctatttctccgattcgcagcgtcaggctacgaaggaggccggtgagatcgcgggcctgaaggtgcggcgtatcatcaacgagccgacggccgctgcgctggcttacggtctggataagaaaggcaaggatatgaaggtcgccgtcttcgacttgggcggcggtacgttcgatatttcgatcctggagctgggcgacggcgtgttcgaagtgaaatcgaccaacggcgatacgcacctgggcggcgatgatttcgaccatgtgctgatcgattatatggccgaggcattcaaagccgagcacaacgtggatctgcgcaaggacccgatggccatgcagcgtctgaaggaagctgccgagaaggcgaagatcgaactgtcgtcctcgactactacggagatcaaccttccgtacatcatgccgatcgacggcattccgcagcacctggttatgacgcttacgcgtgccaaatttgagcagttgtgcgatcacctgatccacaagaccatcgagccttgcaaggtagctctgcgtgatgccgggctcgatgccaagcagatcgacgaggtgatcctcgtgggcggttcgacccgtattcccgcgatccagaaggtcgtcgaggatttcttcggtaaggtgcccagcaagggagtgaaccccgacgaagtcgttgccatcggcgctgcgatccagggcggtgtcctgaccggtgaggtgaaggacgtgctgctgctggatgtcactccgctgtcgctgggtatcgaaaccctgggcggtgtgatgaccaagctgatcgaggccaatacgacgatcccgacccgtaagagcgaggtcttctcgacggcggccgacaaccagccttcggtggagatcaacgtctgccagggcgagcgtccgctggcccgcgacaacaagtcgatcggccgcttccacctggacggtattccggccgctccgcgcggtgtgccgcagatcgaggtggccttcgatatcgacgccaacggcatcctgaacgtatcggctaaagataagggtacgggtaaggagcagaagatccgcatcgaggcttcgtcgggtcttaccgagcaggagatccagcgtatgcgcgacgaagccaaggctaacgaggcgaaggacaaagaggagaaggagcgtatcgacaagatcaacgccgccgattcgaacatcttcgctaccgagaaacagctcaaagagtacggcgacaagttgccggccgacaagaaggctgccatcgaaacggcgctgggcaagttgaaggaagcgcataagaacgctgacgtagccgctatcgatacggctttggccgagctcaatgcagcatggcaggctgcttcgcaggatatctatgccgcgcaacagcagcagggcggtgcccagcagggtgctccccatgccgatgcaggagccggtacgaacggtcagcagcagggtggatccaatcagcccgaagatgtagagttcgaagaggttaaataaaaagttggagggaaggttcggtttgcggactttccggtagaagagccagggtcggcagtatgtcggccctggcttttttgtctgtagggcggattgcgggctgcggtttcggggaacaggtgcttcgataccgcttttcagcgcccttgttgccggtcgggacggtcggactccttcggtgttttcccgcgcgtccggtgtgcggtctttgctgtcggggtgccgcccggaaatgaaatcgcactccttcgattttcggtttcaacggtgaaatcggatggtttccagcgtttttttgtctattccttttttgtttcccgcaattttttctatttttgtgcgtttattgggatttctgaaatcccgtttcgggtaacggaaaagaaacaaacaaattataacaaactaatttatacccaatgcaaagtaaaggcgtaatcaagttacttgcaatcctgctggcgattgcttgtatctaccagctctccttctcactgaaagcgagaagcgtggagaaaaaggcggccgagtatgccgcgaaagtttcggagtcggattcgctccgtcaggcggcggagatctattacctggactccgtgcagaacaggcccgtttatgatctcggattcatttcattcacctacaaggaggtcaaggagaaggagatcaacttgggtctcgacctgaagggcggtatgaatgtcatgctcgaggtgcaggtggaggacgtgctgaaagccctggcaggtgacagcgcacacgatccgatgttcgaggaggccatcgcccgtgccaacaaggcgcttaaagagggtaccaacaactacatcggcgagttcgccaaggcttatcgtgaggtttccggcggtgctccgctggctgcgcttttcgtaagtccggatcgtaaggatatcacgccgaacagctcggacagcgaggtcgagaagatcttgcaggaggaaaccgacgctgcgatcgacgcttcgttcaacatcctgcgcagtcgtatcgaccatttcggcgttacgcagcccaacatccagcgcctgcccaattcgcaccgtattctggtcgagctgccgggcgtgaaggagccggagcgcgtacgcaagctgttgcagggtaccgcttcgctcgagttctggacgacttataataacaccgagttggtgcgtgccctggagcaggccgatcagcttttgcgcgacgaattggctgccggggcgaccgatgcggccgtggaggaaacgcttactgaggagcagccgactgctgccggtaccgaagatacgaccgaaagcctgatcgcagaggtgcagaacaatgctccggctgcggaggaggctgcctcggcttcgggggcatcccgctatacccgcgaggaaaatccgctcttctcgctgctcaatccctatgatggcggaggcgctgtcgtgggttccgtagccgttgccgatacggcgaccgttgccggctacctgcgtatggatgccgtgcgcgagttgctgccttcggacgttcgtttcgagtggggtatcaagggcgaaccgcagaacaacgggcgtttctctctttatgcgctcaaggtcagcacgcccgacggcaaggctccgctggacggcagcgtgatcgtggatgcgcgtgaaacctatgccgagcgcggtgccgaagccaaggtttcgatgtcgatgaactcggaaggtattcaggactgggcgcgtctgacgggcgacaatatcggccgctgcatcgccatcgtgctcgacggttatgtctattccgctccggtcgttcgccagaagatcgaaggcggaagttcggaaatctcgggtaacttcaccattcaggaggcgaaagacctcgccaacgtgctcaagtcgggtaaggtgcccgctccggcacgtattattcaggataccgtcgtaggtccgtcgctggggcaggagtcgatcaatgcgggtattctttcgtttgtactcgcgttcgtgctggtgcttctctatatgggcctctactataagacagccggctggttgtccgatatcgccttgttgtgcaacgtattcctgctgctcggtgttctggtttcgttcggtgccgtgctgacgctgcccggtatcgcgggtatcgtgctgacgatgggtatggccgtggatgccaacgtgattatttacgaacgtatcaaggaggagcttcgcggaggtaaaggtttgagcctggccatcaaggacggtttctcgaaagcatattccgcgatcatcgacggtaaccttaccacgatcatcaccggtatcgttctgttcatcttcggaaacggtccggtgcagggtttcgccactacgttgattatcggtattctgacctcgctcttctgttcgatcttcattacccgcctgctgatcgagggcgtagtcaataaatggggaaagatctccttctcgcgcaagtggtcggagaatcttatgggcaacgctcatttcgacttcctgggcaagagtaagatctcttacatcgttatgatcgtcgttttggccgtttcgtgcgtttcgttcgcggtacgcggtctgaacatgggtgctgagttcaccggcggccgtgcatacgtgattcgtttcgaccgcccggtacaggcagaggaggtacgtatgaagttgcaggatgtcttctccggttacgaggatgccgctaatgtcagcttcgaggtgaagcagtacggcaatgagaaccagatgcgtatcgtgacgcagtacaagtacgacgacacttcggacgaggctacttcggaagtggatcggattctgtacgacgcgctgcacggtctgtacggttatcccatcaccttcgagaatttccgcaatacgcaaaacgatatcaacggtattcttacggcagacaagatcggtccttcgatcgccaaggatatgacttggggcgctatttggtcggtgctcttctcgctgatcgccatcggcctctacatttcgctccgcttcaagaaatggcagtatgcgaccggcgctacgaccgcgctggcattcaatgccctggtggtgatcggcgtcttctcgctctgctacggctggctgcccttcaacctggaggtgaaccaggccttcatcgcggcgatcctgacgatcatcggttatacgatcaacgatacggtggtggttttcgaccgtatccgtgaatatctggtgctctatcccaagcgcgatctgcgcgagaacgtgaacaatgcgctcaatgcgaccctgtcgcgtacgatcaatacgtcgggtacgacattggttactctgctcgccatcctcttcttcggcggcgagacgattcgcgggtttatcttcgcattggctttgggtgtggttgtcggtacgctttcgaccctgttcgtggcgactccgatcgcttacggtctgatgaagcgcgagggcctcggcaagaaataaaggtccgctttttgaataaaataggccgcaacgtattgttgcggcctattttatttttaactttgcctgacttaaaaattgtctgtcatggagcgtttcggttggctgcgtcgttatgtatctccggtctttctggctttgctcgtcgcgtcgttcatcctgtggtatatcgccaagttgaactatacctatacgaccgagcagcctttcaccgtgaatgtggacggcgagcgtttcaaagtttcctgtgtggtggaaggagtcggtaccaacttgttcggctatcgagtctatatgagtaagcggctccggattcccctgtcggagttgaaattccgttccgtgaaggccgaagacggagagaaattcctgaagatagattctctctctctgcacaacgccatttccgtccggttgagcgatatcaaggtcatctccgtcggatcggttcccgaaattccggatccccgtcagcaagaaaaatgattaaggtaggtataacaggaggtatcggcagcggtaaatcgaccgtctgccggctttttgccgcttgcggcgcccctgtctatgattccgatacgcaggccaaacgccttatggaggaggatgggccgttacggaggcggctcgccgcacgcttcggggaggagatctatgcgggcggacgtttgaatcgcaagttgctggccggccgtgtcttttccgatcctgcggagctttcggcgctcaacgcgctggtgcaccccgccgtgatggaggatttcgaacggtggtgcgggcggcagtccggtgccgactatgtggttttggagagcgccatccttttcgaggccggattggaggggtatgtggaccgtacgatcgcggtcacggctcctatcgacgtgcgtattgcacgcacctgcctgcgtgacggggcttcggccgaggaggtacgacgccgtatcgcggtccagctcgacgaagaggagttgcgccggcgggccgactatacccttgtcaatataaatctcagggagctcgaatacgaggttgcccgtctggataaattgttacgcgatgaaaaccgaaaacattctgcctgatttgaccacgccgcgcgttatggcgatcgtcaatgtcacgcccgactcctttttcgccggcagccgcacaccggatgccgaggctatcgaacggcgtgtccgcgaagcggccgatgccggttgcgatctgttcgacgtcggaggctactcctcccggcccggagccgccgaggtgacgcccgaggaggagtggcgtcgtgtggaagcgggggtggccgccgtgcggcggatcgctcccacactgcccgtttcggtcgatacgttccgtgccgaagtggcccggcgggtgctcgaaacattcggccccgtgatcgtcaatgacatctcggccggagagatggatccggccatcgtcgatgtggtcgccgagtacgacgctccctatatcgctatgcacatgcggggtactcctgcgacgatgcaggggatgacctcttaccgcgatgtagtggaggaggtcgtttcctatttccggctccgtgccgagcagttgcgtcgctgcggcgtgcgtcggttgattttcgatccgggcttcgggttcgccaaaaccctcgaacagaactacgatctgcttcgggggctgcacaacctttgctcgctgggctatcccgtactggccggagtgtcgcgcaagtccatgatctataaagtgctcgatacgacgcccgaccgggcgctcgccgggacgatcgctctgggctgggagtgcctgcggcagggggctgcgattctgcgcgtgcacgacgtgcgggaagcggtcgatacggtacgtattttcaaagcattccgcccatgataaaagctacggatatccataagagttacggtgcgctggaggtgctccggggagtatcgctcgaggtgtcgcgcggcgaggtggtttcgatcgtcggtgccagcggcgccggcaagacgaccttgcttcagatactgggtacgctttccaaagcggatcgcggcagcgtcgagatcgacggacaggatgtttcatcgctcggtgatcgggctttgtcgcggttccgtaacgagaagatcggattcgttttccagttccaccacctgctgcccgaatttacggctttcgagaatgtctgtatccctggcctgatcggacggcgtccgaaagccgaagtggagcggcgtgccggagagctgctggcgctcgtggggctgacccaacgccgcgatcataagcccggcgagctgtcgggcggcgagcagcagcgggtcgccattgcccgggcgctggtgaattctcccgccgtgctgttggccgacgaaccttcgggcaacctcgatacccgcaacaaggaggaggtgcaccgcctgttcttcgatctgcgtgaacgcttggggcagacgatcgtgctggtgactcacgacgagtcgctggctctccgggccgaccgtcggatcgtaatgagcgacggtctgatccttcctgagtgacgggagtgactgttctgaaattagtagatcccatttacacgattcttatggagttcgaaccgctgcgcgagttgctcgaaaccctgtacgaccgctacaaccggacggagttcatcgctcccgatccgatcagcgtgccgcatcgtttcgaggggcgtgaagaccgtgaaatcgcgggctttctctcggcgactatcgcctggggcaaccgtcgtgcgatcgtcggcaatgcctgccggatgatgtcgtatatggacaacgcccctgcggatttcgtgaaaaatgcttcggaggaggagcttcgcaagctgacagtctgcgtgcatcggaccttcaacggcgaggacctgatcgcttatgtacgggcgctgcgttcgcttttccgtcgttacggcagtctgggcgagttcttcgaggggcgttatgcggccacggggtcgatcccgtccgttctctccgattttcgccgcgagtttttcgccgagccgcacccgatccgttcggagaagcacctttcgtcgatcgacaaaggctcggcttgcaagcggctgaatatgtttctgcgctggatggtgcgccgcgatgatcggggcgtggatttcgggctctggcgctcgatccccatgtcggcgctctatctgccgctcgaccttcattcgggcgacgtggcacggactttgggattgcttgtccggcggcagaacgactggcgggccgtcgaggaggttaccgccgtgcttcgcacgttcgacccggaggatcccgtgcgttatgatttcgcgctgttcggcgccggtatggacggttttctaaaaggatagccatgttccggttcaaacagtttgccgtgcggcaggatcgctgcccgatgaaggtcggaaccgatggggtgctgctcggtgcctgggccgaagtgcgtcccggggaccggcggatgctcgacgtaggtacgggtacgggcctgatcgccctgatgctggcccaacggagtgctgcttggattacggcggtggatatcgatgtggagtgtgcgacgcaggcggctgaaaattttgccgcgtcgccctgggcggaccgtttggatgcagtgtctgtcgcggtgcagcgatacgatccggttgaaaaattcgatctgattgtttcgaatccgccttattacgtcgattcgctgctttcgcccgatgaagggcgcaacaccgcccgccatgcggcgggactgccgttcggagagcttgcggcggctgtcgtccgcctgctttcgcccggcggacgctttgcgttggtgttgtcgcccgtcgagatgcagcgattccgttcggcggctctcgggcggctctatcctgttcgctggacggaggtttgttccacgccccggcgcggggtgcggcgtatccttgcggagttctgcacgacgcccgtaccggctccggagcctgcacgtctgattatcgaactcggcggcccggactcctatacggaggattaccgccgtctgacgggggatttctaccttaaattttgattatacgggcaattcgtataaatttgcataaattaaaattttctgtgaatatgaagagattgttatggatgcttccgctgcttttcgcagggatgacggctgcggcccagaatcaggatatggcccgattgggaacctatatgagcaacggcgaattcgtggtcggcacggccgaaaccgttcttgcggccgatattacggtgcgttgcgagaagatcgtctgcggtccttatgcccgctatgcccagaagttcctcggtctgcgtgcgccgcttaccgataagaccgtctatacggtcgccgatgccgccattgcgttgatgccgggcgagcgatacgtgaccgccggggaattgcccgcttcgacctgtcgggtggagagttacgaggctcagggagccgatttcgcccggttgcagaccgaccgcctcgacatgaccgaaaccgatctgcaaaccgcagcccggaatgccgctgccgcgattttttcgttgcgtaaacaccgtctcgacctgattagcggcgaggctggagagaatgtcttcggcgcgggacttcctgtggcgttggagcgtctcgaccggctggagcaggagtatctggaacttttcctcggccggcgtgtggtgacgaccgaaacccgccgtttccgcgtgacgcccgccgagggcaaattgcagcagatcgtctgccgtttcagccccgatgcggggttgttgccggccaacgacctgacgggagatatcgtgctgttgcagtacgagccgcagggtatggctgtcgatgaagccggcgtgcgtcccacttcctctacgattccgtaccgtattgccgctctcacgcgctgttcgctcatcgctgccgggcaggagcaggccgcgcaggtgctgcccgttttccagttcggccgtacgatcgcccttcaagttcccagaaaccgctaaactatggactatacgtcgcggatggctgccctgctggggcgttttcgccgggagcggaacggcgtggtggccgatacgatgcagtatcgggggaaagcgtatggactaaattacggtgtgagcctgccgacgatccgtgctgtcgcgcgagccgagcgccccgattccgactttgcccgtttcctctaccggcaggatgtgcgggagctgaaattggccgctttctggatcgccgatcccgtgcaggtgacttccgtcgaattttccgactggggcgaaggtattgccaattcggagatggccgaagagtgcgccttcgcgctgatgtcccggtcgccgcgcggcgacgagtggggcagagcctggtgcgatacggggaacgaattgctcgggtatgccggcttgttggctctttcccgtattccgcatcccgatttcagttccttggtcccggtgctccggcggctggtcgtgacgtatcccgaatcgaatttggtcgcgcagggtgtcgtggcgctgctggcggcgatcatgacgaatcccgccgtacaacggcaggacatcgaaatattcctctcttcgctcgggccgggaaaaacggcccgttacatcgaggaggagatgacctggcggctggagtactaattcaggcagacgtgttcgactgtttcgacctgttcctggagcgccagcaattcctgataggtcagcgggccttcgcagcgtcggatctcatcccctttgcggaagtagatcagtgtcggcgtcgtgcggatcatataacggtagagcaggtaggcattctcgtccgcgtcggtgttgatccggtagatgtccacgcgtccggccatgcggcgttcgaattggtcgagcacaggctccatggcttcgcacggaacgcattgactggtgaaaaaatagatcatcgtgatcgcgttgcgacctattatcttatcgaaatctttcatatttaagcggtattttttgtttttgccgattttcgaatccttttctgaatgacaggtgccgtatctgtttctcgaagaactcttcctttttgagggaagtaccaaaaatagtgccccgatgagttatcatcggggcttctcgtgcaagttttcaaaagataccgggaattctgcctatccttccgcgaacagggcacgcggcagttggtcgatgctgttgatcgtgacgatttcgatacctttgggttttttgatcgaacggcccaggtagcccgacacgacgatccgtctgaacccgagccgggcagcttcgctgatacgctgttccgtacggggggcggggcgcacttcgcccgacaagccgatttctcccgccaggcagatcccttcgccgatcggacgatcgtagtaggaggagatcaccgctgccgtgaccgcgaggtccagtcccggatcggcgaccttgaatccgccggcgaagttgaggaatacgtccttcgagaacatcttcattcccacgcgtttttcgagcacggcgagcagcatgttcatacgtttgttgtcgtaaccggtcgccgtgcgctgcggagtaccgtaggccgcgttgcttaccagtgcctgcacttcgatcaggtaggggcggatgccgtccaccgaagctcctacggcgatgccgctgagcggggtttcgtagtgcgaaagcaggatttccgacggattgtccacctcgcgcaaccctgcgtcgagcatctcgaaaacgccgatttcgaacgtagctccgaaacggttcttgattcctcgcagaatacggtatatcaggttgttgtccccttcgaactgaagtacaacatcgacgatgtgctccaggattttcgggccggcgatcgtgccgtccttggtgatgtgaccgatgatgaagatcgatgttccggtcgctttggcgtatttgagcagcgatgccgcacattcgcggatctgcgaaacgctcccggccgacgattcgatgatgtcggtatagatggtttggatagagtctatgaccaccaggtcgggccgttgctcttcgatctgggccagaatattttccaacagagtttcggcatagatcagacacccttcgttgccgatgcccagacgcagggcccgcatcttgatctgctcggccgactcttcgcccgaaacatagagggttttcaggccgttgtccgccagggcgatttgcaggctgagggtcgatttgccgatacccggctcgccgccgagcagcacgagggagccgggcacgagccctccgcccaacacgcggttcacctcccggtttcccaggtcgatgcggcggtgttcgctttcgtggatgtcggcgattcgctgcggacgggctttgggcaggttggcgacagtcgcaggtccgccgccgctttcacgggcgatcacctcttcggtgaatgtgttccattccccgcaggaggggcagcgtcccaaccatttgggggcttcgaagccgcagttgcggcagaagaatgctttcttgacctttgccatgtcgtatcgtttttccggggagtgccgatgctgccgcgacgggcatccgcattccttgttataatcccatttcctcgtcgatcagaatcacggtaatccgcttgcggggaaagcagcgctccatccgcagatgcgtgttgcagatgcgcccttccgagtcgcagtcggcgcaaacgcccgtcactgcacaaggggttttctgtcccagccgggcgacgttccggggtgccgcgatgtcgcggatgcgtgcctcggccgcagcgcgtgtcgccacgatcttgttgcgccctgcgaccagcagcaccttgcgggggccgaaggcgatcgccgctacccggttgccgatcccgtcgagccaatagagcgctccctcttccgtgatggcattgattcccgaaatgtacagatcggccagcaaaccctgtcgccggatctcgatccgttcttcgggcggtaaggtgtaatccactccgtcgaacaggcggtaacgcccctcccggcgaagctcatcgacgatgcccgtcgcctccatcgtcatggagcctccgaaagagatcgtttccggggcggtggcccggatctcttcccgcaggatctgccgggcctcttcggtcgttgcggcgatccggacttcgaatcctctgcggaggaggttcttgcggcactgttcgaatgtttcgttcatatcgtcagtagaaaatcgtaatcttcggtttcgttctcttcaggggcctttacaagccgaggtcttcgtcgatcaacaccacggtaatccgcttgcggggaaaacagcgttccatccgcaggtgcgtgttgcagatacggtcttccgaatagcagtcggcgcagacacccgttacggcgcagggcgtgcggaatcccggatgccgggctatgttctgcggggccgcgatggtgcggatccgttcttcggccgcttcgcgggtcggtgtaatcttgttgcgtcccacgaccagcagtactttgcgcggcccgaaggcgatcggggcgatgcggttgccgatcatatcgagccacagcagggcaccgtcttccgtgacggcgtttataccggtaatgaagagatcggccagcaagccctggcgccggatttccagcttctgcggccgaggcatcgcagggtcgaaaccgtcgaacaggcggtagtggccgtcccgatgcaggtcatcgacaatacccgtggctttcatcgtcatcgaatccccgaaacagatcgtttccggggcggcggcccgaatttcttcccacagaatttgccgggcctcttcggtcgttgcggcgatccgggcttcgaatccgcgccggacgagattccggcggcagcgttccaatgtttcgttcatggcggcgttatttgatgaagaatcggtaaatgtcgtttccgttggcatagaccagcagtgccagaataatcatcaggccgacgtattgggccacttcgaggaacttttcgctcggcttgcggcgcgtgatgatctcccacagggtgaacagggcgtgtccgccgtccagtcccgggatcgggagcaggttcatcaccgcgaggatgatggacaggaaggcggtcttgagccagaagtcatgccagtcccagctaccggggaagatgctgccgatagccacgaatccgcccagttcctcgtacattttggttttgggctgcacgatcagcttcagttggtcccagtagctcgaaatcgtctttccggccttgtggatacctgccgggatggactcccagaatgtgtaatattgtgttcggagcgaatagggattcgtgaccgtcacaccgatccgtccttcggcatcgacgggcagtgcgagcgaatcgatgagcgcaccgtcgcggcggacggtcagcagaaccttgtcgttcttgtgtttttgcaggtagtcgcggtatcgggggtagtccgcgtcgcgcagatcgtcgatcgctaccacttcgtcgccggactcgaggcccgcttcgactgccgaggtgtaggatacgctgtccacgatgaaggggagccgcagggtgaagaggtcctcgtaagccttctcctgccgcatacggagcagggattcgaagggaatgtcgagcgttaccggctctccgccccgttcgactaccacgcggcggccgccgtcggtaatcagcaggtcgttttgtacccgcatgacgttgtcgatctcctcgccgtcgatcgacacgaaacggtcgccgtcccggaagcccatttcgtgagccgtcgggttgaaattatagccccatttcgcgtcctggttcgaaaagtaggagtcgccccaggtgtagcaaacggcgcagtagatgacgatggccagcaggacgttcatcatgacgccggccaccattaccaggagccgctgccaggcgggtttggcccggaattcgtcgggtttgaccggctgtttcatctgttccttgtccatcgattcgtcgatcatgccggcgatcttgacgtagccgcccagcggcagccagcccagaccgtactccgtgtcgccccgcttgaacttgaagagcgaaaaccacgggtcgaagaagatgtagaatttttcgacgcggatcttgaaagcccgggccatcaggaagtgcccgagttcgtgaatgcccacgaggatcgtgaagcagagaaaaagttgagcgattttgataagaatatccattgcttaagcgttcgtttttcagtttgttttctatgtcaggtacggcggtaaccccgttctgtctttacctgtcgaaaacatttattgtaagaatgttctttgccgataatcagagccgcaggtattcggcggccagacaccgggcttcggcgttcgtttcgcccaggtccccgagggacggcacggctgcgaacgaggatttgcccagtgcgtattcgatgctgcgcacgatctccagataaccgcaccggcgggcgaggaaggctgccacggccacttcgttggcgccgttcatcgtacagccggccgtgccgccgcgccgcagacagtcgtaggcgaggtcgagggccgggtatttgatccgatcgacctcggcgaaggtgagggtggggtgctctgcgaagctgaaaggcgccaccggacggtcgaggcgctgcggaaaactgagcgcataggcgatcggtgtccgcatgtcgggcgatcccagctgggccttgatcgctccgtcgccgaattcgaccatcgaatgaacgatcgactgggggtgtatcagcaccgatatccgttcggccggtacgccgaacagccagtgcgcctcgatcacctcgaatcctttattgaccagcgtggcgctgtcgatcgtgatcttgtcgcccatccgccattggggatgcttcagtgcctgttccaccgttacgtgagccagctcctcgcggctgcggtcgcggaaagctccgccgctgcaagtgacgatcagccgtcgcacgggcgacttttctcccgccaggcactggaagatcgccgagtgttccgagtcgatcgggacgatcggggctttgtgccgggccgccagcggcatcacgtaacagccgcccgccaccagcgtttctttgttggccagcgccacctttttgcccgcttcgaccgccgctatcgtcggcattaggccgacgtagcccaccagggcgttcacgactacatcgacctgcccgctctgtacgacttgccgcagggcttcctcgccggcatataccttgatcgacgtgccgtcgagtgcctgccgcagggcgtcgtattgccgttcgtcggcgatcaccacgctgtcggcgtcgaactccacggcctgccgggcgagccgctcccagttgcgatgggccgtaagggtcgtgatctcgaacagtccgggattttcccgaacgatgtcgagggtctgtattccgatggatccggtcgatccgagcaaggcgattctttgtttcataacgaaggtcagaagacgatataactctccggatcgacgggcttgccgttgctccaaagttcgaattcgaaaattttggcgtcgccgccgtcggccagcacttccgtattggatccgatgacaccgccccgttttattcgctgtcctttggctactaacgatttggacaggtttttataaatcgatatcaggttgttggagtgctgtatttcgatcaggtaacccgtttcgggggtccagagattcatcaccaccacgccgtcgtccgccgcgacgatctgggtgtcgggcgatgcggcgatgcggatgccgaaattctcgcgtttgatgtcgaaccgctcgatgacgatgccttcgatcggggcgaccatttcgatgggcttgcgtgcggcaccgccgcctgtgctctgcccgaggctgtaaggaccttctccctccagttcggcccgcagcagcgaatcttcgcggctgggcaccacgagtgtcttgttcgtgcggatgctgtcttccttgcctacggttcgcaccaccggagtcttgccctccatgatgagggcgatgttgttgttataggtaatcatgtcgttcatcatccgctccatggaatccagacggatgacgctttgcatcagattttcgcgcgagcgggccgcttcgacgcggtagccgggcaggagttccagcaccggcgtataggccacgatcgacagaatgaggatgaaaagcagcagcgcgaaagccagaaacgcggcgagcagacctgccggggagatgtgggtgtaccactcctcgacgttgtcggtcgcattgagcatgctcaggcggcgtttgcgggagaagcgtttccaccacgaggatatggaatgaaatgcgttcatggttctgtttttgatcgttgtttgcgattggaccgaaatccgcaggggtttctgccggtcgaaaagccggggctgtccgtttcgtctttccggtccggcatatcgaacggggccgatggtattcctgccttttcgcgccggaaagttgaattgtacaaaggtaacaataaatctttgaatttaatgccggtttccttacctttgtacgtttctttgaaacgagtaaaaactgaatatagtatgataaaaccgacattattggtgttggctgccggcatgggatcccgttacggatcgctcaagcagatggacggggtaggtcccggcaacgaagccatcatcgactattccgtatatgacgccattcgtgctggcttcggcaaggtggtatttgtgatccgccacagtttcgcttccgacttccaggaggttttcaccgaagagcgtttcggcggcaggatccgcgtggagtatgtctatcaggagctggattgtctgcccgaggggttcaccgtacccgaagggcgtgtgaaaccctggggaacgaaccatgcgattctggtggcgagggatgccgttcacgagcctttcgccgtaatcaatgccgatgatttttatggagcggaagcgttccgtaccatcgccgaataccttcgcggattggatggagcgtcgggacgctattgcatggtggcgtacaagttgagccggacgctttccgaaaacgggacggtgtcgcgcggcgtctgttcggtgaacgctgccggcgaccttacgggaatggtcgagcatacgcagatcgaacgcacggcggccgggatcgtcgatcacggtgcgaacggggatgaaccgttggccgaagatacgcccgtgtcgatgaaccttttcggctttactcccgattacttcgcccactccgaggctttttttcggtcgtttctgcaggagagtgccgggaatttgaaagccgagtgctatatcccgtcgatggtcaataagctgatcgccgacggcacggcttccgttcgggtcctccgttctccggcgcagtggttcggcgtgacctataaggaggataaaccgttgctggtcgctaatttgaagaagatgatccgggcggggatttatcccgaatacttgtggcgatagacaaatcgtcgtcggtccggtaatggaaaatcgccgatccaaacggatcggcgattttgattggttttcctgcactcgacgaagtcggtttgcgagtagaaggcttttacaagtttgggtgtcgtcccaagtcctgatcgaaagaccaggctattccgttcgtctttcgctttctgtgcccgatgcccctgaaaggccgctcgttgttgttaccagccacctgtcagcctctctaaaacgaagtttaggctctcaaccacctgtccgccggctccgattcggaggtattcgtgattccgggacaggtgaaatacccgggcttaatccaggtaaccggcttctaccagttgttggcggattttcacccagtcggctaccggacgggctacgccgtccataaagcggatcggacatcccagtgcactgtcgtcgatataaaggtcggcgtggactttcggcgacgaagtccaggacttctgcccgggattctcgttgatggcgtacagcggaattttctgttccttgaaccattggacggctttttcgagtagttgtccgctgcgcatggtgtacaggatgagtttgcagtcgttcgccacgagctccttgagtacgggaaccgcatctgcgtccatccccatatgcggataggcgtgtgtcacgacggttccgtcgaaatcgatcgctatgattgctcctttaacggccatatcggttatttcttttgaaatttattacgtgtccattcgcataatttgccccagaaacccttctttgtcgtggtttcctcttcgtcgaggccatacccgtaaccatagccgtagccataaccgtacccgtgacgctttgtcgagctggctccgttgaggatgatggccatgttatggaatttcttttcgcggtacagccgttcgatatccggcaactgacgacggtcgagcaggccttcccgtactacataaatgctgagatctgccagacggtcggtgatgatggcgtccgctacggccatcgccggggtgctgtcgataattatgtagttgtagcgtagtttcagttctgcggtcaactcttccatccgctggctcaacagcatttcgctcgggttgggtggctggatgccggcgtagatgatgtcgaggttttccgacagtttggatttgcggatgatcgcctgaagctccgtatttccggacaggtagctggaaatgccgttggtatctccgccgtgccccatctgtttggagagggtgcggtgccgcaggtccaggtccatgatgacgaccttcttgcccgtcgtggcgaacgtcatggccaggttggtcgaaacgaacgtctttccggcgtggggattcgacgaggtgatcataataacttttatctctcccttgcccaggttcatgaagttcatgttcgagcggatcatgcggaaagcttccgacaccggatcgcggccgttttcgcgtacgacgaagctgccctgttgcttttctcccgaatattgcggaatatcccccaggaacggagccgaaaggttgtcctcgatgtccttcctcccccggatcgtggtgtcgagtatctggatcaggtagatgatcaggaaggggatgcccagtccgaacaggaaggcgattcccgcaatcagcacggtattgggcgatacggggcgcggggaaccgtatgcactgtcgatcgtgcgcgagttgctttccgtgatgaccatcgtgatggcgttttcctcgcgcttgttgagcaggtagaggtaaagttcctccttgattttctgctgacggacgatgtccagaatctgtttttcctgcgtcggtaccgaggatattcgttgattggtcagcgcctcttcctttcgtaaagcggccagttggatctgcaacgtggagatataggagtcgagcgtcgcgatgatcgaccggcgtgtggaagccagtccgttgccgagattctgaatgatcgggttgttctccgaactctcggagttgagcttcatatagcgttgcaactcggtattgtagccctctatctgggagttgatcgccgggctgttgatcgagagcgttccgggaatcagttcattggttttggtcgggtccagcaggtattctttgaggaattccgtcattcggatctggttttccagcgagaggccgtcggttttatattgggcgctttcggtaatcgtctgctcggcttccgatacgatatcgtatattttgttgtcttttttgaatttttcgatgttgcggtccacttcgctcagttcttcggaaatgatctccaaccgattgtcgatgaattgtcccgtgctttctgcgatcccccgtttatcgtcgatcgcatctttttcgtaaaccgcgatcagcgtattgatgacatcttccgcttttttgggaacggagcttttcatagaaatggtgatgatcgaggcctgtttgttggctacgaaacttttgacttcatgctggtagaactgcgttactacgcccaagttgcctttggtgacccggatcggagccttttcgtagtaatcgggggacatatagagagtcggccggataatcatttggccgacaggcgtggagatcgtatcgccgaatacggccgaaatttcctgtttgaatttctgtttgtcgggaccgaatatttcgaagtagttgagttttacgatgctgtcgggacgcagcgaaacttcgaaccggaatccctgtcggtcgttatcgttgatgaactccactgcgatcggactttgcccgtagagatcctggggacgtaatccgtccttcgtttcgtattgaacggtcaaacccagctgtttgaccacttccgtcatcaggcggcgcgattggagaatataaatttcgttgtccacattgcggcgctgtgacaggcccgccaggtcgctcagggtcgccaggtcggtatctcctcccttgcggctgtctttcacgaggatgttggccgtgcggctgtatattttcggggtgcgtaaaatgtagatgtaaccgcatccgacgcaaacgaataccgagatgacgaaccaataccagttggcgattaccgtctggatcagatcgtgcaccgagaaagtaatgtgttcctcctgctttgtatcgctgttcgcggagttcgggttgatattgttaggtgtcatgccttgttgtgaaaattaacgggtgagtgtgacgatcagagtcgctacggacacggcggtgctgaccagcgagatatagaaactgcggttctggctgatttcgccggcctgggcccggtacttgttcggcttcacgtaaattacgtcgttctgctggagatagaaatagggcgaatcgtaaatgtcctgcgaagtcagatcgagagatgccgtggtgcggacgccgttttcctcccggattaccttgacgtcggagcgcacgccgtagatggtcagatcacctgccagcgacagggcgtccaacagggagatgcggtcgttggtgatgtcgtactgtccgggacgggcgacttctccgatgaccgagattttcatatcggcgaactgtatattgaccgtcgggtcgctgatgtatccgccttcccggattttgtccgcgatttcctgggccagttcactgcgggtcttgcccttgcattgaatggggccgatgatcggcatatcgaggtcgccgttttcatcgacggtcctgatctgtaacgacgcactgttcgacgaataggtcgaaagaggggttccggtcagggagttgagagaggtcgatgtattgaacggcgcagccagttccgggtcccggctgttgaccacgacggtcagacggtccagcggcttgatgcgtatttgataatcctgggcgattttgatctgctcgtcggcttgagtgtcttgcaggtagatgacgcgcttctgggaggcgcatgacgcaagaacgacgaccccgagcaggagggcgaaggcctttattcgtttcatttcgaaatagttttgtagtacacgtgtaattttggtatgcaaaggtagaaaaaatatatgaatgggaaaggtttttgtttgctatatttgcgattactgtattttataacgctaaaagagacgattgattatatgatgaatgctgtgtggagccggaatgccgtgttgtacgagatgaatctgcggcagacgacgtccgagggaacgcttgccgccgctgcggagcggctcggttttttgcgggatttgggcatcgatgccgtttggctgatgccccattatcccattgggaaggtcggtcgcaagggatcgctgggttcctattattcgattcgggattaccgggctgtcaatcccgaattcgggacgatggccgatttcgacgcttttgttcggagggctcatgccttgggaatgaaggtcctgatcgactgggtggccaatcacacttcgcgcgatgcccgctggctcgcggaatgtccgtctgactggtacgagcgggacgcttcgggccgacccgtcgttcctgacgggtgggacgacacggccaagctcgattacaccaatcgggccgtctggcagggacagatcgacgccatgcgtttttggcttgcggaacacggggtggacggtttccgctgcgatatggcgatgctggttcccatcgaattttggcaggaggcggcacggcggttgcgggcggtgaaacccgacctgttcctgctggccgaagccgaggaggattacctgttcgaccgggctttcgacgcgtcgtatgcctggcggctttatcacctgatgaacgacgtggcgcagcaaaagtgccgggtcgatcgtattcgggagtatctctatgccgatcgggagcacgtcccgacctgggccttgcggctgatgttcacttcgaatcacgacgagaactcctggagcgggagcgaattcgcccgcttggggcctgccgtgcgggtcatgacggccctgacgtttctgctgccgcagtcgctgccgttggtttacacggggcaggagttcggttacgaccactctttcgcctttttcgaccgggacccgctgcctgcttgcgagccgaacgaaacgacggagttctaccggcggctgatcgctttgcggcacgatgctccggctctcgcttccggggagcggggcggctccttcgtcgaaatccgcaacaatgccgaggattgcctgctgactttcgtgagggaaactccggaaaatcgggtagtcgccctgttgaacgtgtcgccttatgaagtccatgccgatttcgatacgggaatctacgccggaggctatgcggacgccctgacgggcgaacgcgtacagctctgctcgcatgtcgatgagcggatgccgggctggagcttccggattttgacacggccgatgtagataggccggattttttcgtacatttgccggcgacggggaggccgttttgcgaagcggcaacggcttcccggtttcggaaatgcgcatataatataagttgcattaggtaggtttagtaggacgatgaaaaaaataattctgacgatattttgcttcggaatgctgttcccgcttctgggttcggctgcccggccgtacggtgtggaggagattcccaacgtgcaggtcggcaaccgttatcggttcacgtcgaatcccgacggggttctttccccttcggcagtcgccgagatagactcgctttgctattcgctcaggcatcgggcgctggcccaggtcgccgtggtcgctgtggaggatattcgcggagatgatcttttctccttcgcccatacgcttttttcccaatggggtgtcggccgcgccgattcggacaacggactgggcattctcttggtcgtcgatcgccgggaagtgcggttcgtgaccggaccgggactggaaggcgtcttgcccgatgcactttgcaagcggatccagatgcgttacatgctgccgtatttccgggagggagattacagcgccggtatggtggcggggttgcgtgccgtggcatcggtgctcgagggcagcgagctcgattcgggcggcaacgacgatttccgggctgcggacgatttgccggtgtgggcggttttcctgatcgtctttctggtcgtcctcgtgccgctgggcatcatgctggtcggattctaccattccaggcgttgtccccggtgtcgtgctttcgcattggtgttgcaatcgcggaatctcgtcgggcagacggaccattacaacctgttcgaagacacttaccgttgcggcaaatgcggtttcgtcgtgaagcggcagtcccgaagtgcacgcagcgataacaacaaccatcgcgggggcgggggtatgtggatcggaggtttcggcggcggacacggttcgggcggcggcttcggtggaggtttcggcggcggcagcttcggtggcggcggtgccggttcccgttggtaaatttggaaattcactaaaaaacgatagaaaaaatgaaaaaagttatctggatcgtagtggtcgtacttgtggtgctgttcatcagcggctcctgttcggcctataacagaatggtcacggccgaagagaccgtcaatacgacttgggccgatgtcgaggcgcagtaccagcgtcgttccgacctgattcccaatctggtcaataccgtcaagggctatgctgcgcacgagcagtccacttttaccgaggtggtcgaggcccgtgcccaggccatgtcgttcaaactggatgcagcggacctgacgcccgagaagctggccgagttccagcaggcgcagcagaaggtgggatcggctctggggcgcctgatcgccgttgcggagcaatatcccgacctgaaggccaaccagaatttcctggagctgcaagcccaactggaaggaacggaaaaccggatcgccgtggcccgcacacgcttcaacgatgcgacccggcagtataacgtgacgatccgccgcttccctgccaacctgatcgccggcatgttcggcttcgatcagaaagcctattttgcggccgaggaaggtgcgcagaccgtaccggaggtgaagttttgagattccggcctgtgaacggcggtgcggcgatcctgaaaggtcgccgcaccgcgttatgtgtcgaggtcgtaaatgggatttcgccggtcctccgaaggcttcggccgtggtgcgaacccttttttgccgcaaggaggtattgataaaaatttcggggatcgcggttaaaatacccgataaatttttgtacttttgttccttgaattatcatggataattgtgaccataccttatgttaagcgttttattctaccttttcctgttcgttatctgcactttttttctggtattgtccgccgtggcgttgcttttgacgtggcctttcgacaaatcccggaggatcgtgcacgaactgtcccggatactggtccgtattttctatgcagttccgcctctgtggaagttccgggttaccggcagggagtatatcgaccgtcgcaaaccgtacgttatcgtggtcaatcaccaggccggcctggatattccgaccctctatttcgtaccgctcaacttccggtgggtttccaagcgggaagttttcaaggtgccgtttttcggccagttccttttgctgcacggggatatctgcatcaaccggggacatgctacggccgcgatggagaaggtgatccgcgacggaaagctgtggctttcgcgcggggcttcggtggcgatctttccggagggcacgcgttcgcacgacggcgaaatctatcgtttcaaggcgggggctttcacgctggcgcgcgaagcgggcgtcgaaattctgcctgtggtgctcgacggtacgaccacgatgatcggccgcaacgggatgttcaactggcgcaataaattgacggtaagtattctgccgccggtgagcgccgaacgggtcgccgctgccgatccgaaggagctgatggagcaggtgcgggcttcgatgtgcgtaaggctcgccgaaatcaggaaacagaaataaacgattatgttcgataaaaagatagataacaccagcaacagctatggcgacgatgccattgtgaccctctcgccgagggagcatatccggttgcggccgggtatgtatatcggcaagctgggcgacggctcgcaggccgacgacggcatttacgtcctgatcaaggaggtggtggacaactctgtcgatgagttcatcatgggcgccggcaagcagatcgacgtgacggtcgaggacgacatcgtgactgtccgcgactacgggcgcggcattccgctcaagtccctcgctgcggccgtcagcgagatgaataccggcggcaagtacggcggttcggccttcaagaagaccgtcggactgaacggagtcggcgtcaaggccgtcaatatgctttcgagcgaatttaccgcccgttcggtgcgcgacggcgaggcccgcacggtgactttcgcgcaggggctcgaacagagcgaccgctgggagagcggcgtgcaggagaaaaacggtacgtttatcagtttccgtgtggaccgggaggtgttcggtgactattcctacaatctggagtatgtcgagcagatgattcgcaactatacttacctcaatctggggctgaccttccgtttcaacggccagagctatgtttcgaagaacggcttgctggacctcctgggcgagaacatgaccgaagagccgctctatgcgccgatccacctttcgggcgaggatatcgaagtggccatcgcacacggtacgggctacggcgagagttactattcgttcgtcaatggacaatacacctcgcagggcggtacgcatcaggcggctttccgtgaagcgatcgccaagaccatcaaggagttttatcacaaggattacgatccttcggacatccgcacgtcgatcatcgccgccatttcggtccgtgtgaccgatccggtgttcgagtcgcagaccaagatcaaactgggctcgaaggagatcgaaccgggggttccgctgcgcaacttcatcgtcgattttctggccaagcacttggacgactacctgcacaagcactccgagacggcgcagattctgcaaaagaagatcgtcgagaacgagaaggagcgcaaggcgatctccggtattcagaagaaagcccgcgaaacggccaagaaggtgtcgctcaacaacaagaagctgcgcgactgcaagatacatctgacggacaagaacgagctggccgaggagtcgatgatcttcatcacggagggtaattcggcatccggttcgatcaccaagagccgcgacgtgcgtacgcaggcggttttttcgctgcggggcaagccgctcaactgcttcggcctcacgaagaaggtcgtatatgagaacgaggagttcaacctgttgcaggcggcgctcaacatcgaggaggatatggacaacctgcggtacaacaaggtcgtgatcgccaccgatgccgatgtcgatggcatgcacatccgtctgttgctgatgaccttcttcctgcaattctttcctgacgtgatccgcggcggacacctgtacgtgttgcagacaccgttgttccgggtgcgtaacaagaaggagacgcattactgttacagcgaggaggagaaaaaccgggcggttgcacgatgcggcgccaacgccgaaatcacccgtttcaaaggtctgggtgagatttctcccgacgagttccggggattcatcggccaggatatccgcttggacaaggtgcggcttacgaaggacgacccgatccacgatatgctggagttctacatgggtaagaacacctatgagcggcagggcttcattatcggtaacctgcgtatcgaggaggatatcgtggagagcgacctggcgatcgggtaaccgccgtttcttgtcggccggtgcggttttcttgtgcggtgccggtgcgaaaccgaaaacagaacatagactatgagcgaacaaagagaagatatgacggaacgggacgatctgcccggcgaggttcttgcggcggcggatgacgctgcacggagtgtcggggccgaagagtccgccgctccgacgggcaaatacggcaagttgctctccgaggagggcggcgtgcgcaagctgacgggtatgtaccgcaactggttcctcgattacgcttcgtatgtcatcctggagcgagccgttccgcacgtgcaggacggactcaagccggtgcagcggcgtattctgcacgccatgaaagccgtcgatgacggtcgttacaacaaggtggccaatatcgtgggccagaccatgcagtatcacccgcacggcgacgcttcgatcaaggatgcgctggtgcagttgggacagaaggacctgctgatcgactgtcagggcaactggggcaacatcctcacgggcgacgaagcagctgcgggccgttacatcgaagcccgcctgtcgaaattcgccctcgacgtggttttcaacaagaagacgaccgagtggatgcgctcctacgacggccgtaacgaggagccggtgacgcttcccgtgaaattcccgctgctgctggcgcagggtgccgacggtatcgcggtcggtctggcgtcgaagattctgccgcacaacttcatcgagctgatcaatgcggcgatcgcgcatttgcaggggagggatttcgtgctgtaccccgatttcccgacggccggcatgatcgacgtgagccgttacaacgacggactgcggggcggtacggtcaaggtgcgtgcccgcatttcgaagatcgacaagcggacgctggccatcaccgagattccctacaccacgaccaccgagtctatcaaggattcgatcgtcaaggccaacgagaagggaaagatcaagatccgcaaggtggacgacaatacggccgagaaggtcgaaatcatcgtgcaggtcgcgcccgacgagtcgtcggacaagaccatcgacgcgctctacgcttttacggactgcgaagtgtcgatcgccccgaatgcctgcgtgatctgcgatgacaaaccccatttcctgggggtgagcgagatcctgcgccgttcggcggagcatacccgcgagctgctgaaaatggagcttgaaatccgcctgaacgaactcaacgaagcatggcatgcggcttctctggagcggattttcatcgttaataaattgtatcagctcatcgagggctgcaaaacccgcgaggaggcttacgcagccgtcggcaaggggctggaaccgtttaccaaggtgctgcgccgtgcggtcacgaccgaggacatccagcgtctgacggagctgaagttcatccgtatttcgcgttacgacagcgacaaggccgacaacgagatccggcagatcgaggaggatatcgcccagacgcagcaccatctggcgcatctgaccgactatacgattgcttattacgaacgtatccgcgacaaatacggcaagggccgcgagcggcgtaccgagttgcgcgagttcgactcgatcgaagcgacgaaggtcgctgtcaccaatgccaaactgtacgtcgatcgtgtggagggcttcttcggaatcggcaagtcgatgaaggattccgagttcgtgtgcgactgttcggacatcgacgacgtgatcgtgttcaccaaagacggccgctatgtgattacgaaggtgagcgacaaagcctttttcgacaagaatatctattatatcggggtgttcaagcgcaacgacgagcggacgatctataacgtcctctaccgcgacggcaagaacggcccgatcctgatgaagcgctgcgccatcaagggtatcacgcgcgacaaggagtacaacatcaccaaaggcgatccgaagagtgaaatcctctatatgtctgtcaatccgaacggtgaggccgaagtgttgaagatttacttcaagccgcgtccgcgtttgaagaaggtgatcgtcgatctcgatttctcgaccgtggcgatcaaggggcggcagagccagggcaaccttttctcgcgttacggcatccataagatcgtcctcaaggagcggggtacttcgaccctcggaggacagcagatctggtacgacgaagacgtgcaccggctcaatacggacggccggggcgtattgctcggcgagttccagggggatgacaaactcattgtccgcacggccaagaacgtctattacacgacgaatttcgacattacgcagcactttcccgacgatacggttcacgtgtcgaaatattcgcccgacacggtctatgcggtggcctatttcgaccgctcgcagaattactactatctgaagcgctttacggccgagcagggtgaaaagatgcagtcgttcctggacgaagatgccgatctggtggccgtgacgtcctgcccgggggctgtgctggtgctgaccttccagggggcacaggcttcgcgtccggcggaggagatcgacgtggacggtttcgtcggcgtgaagagccaccgggccaagggcaagcgccttacgacctacgacgtggcgacgctcgctttcgtggagccggagcgacccgagcggccggagccttccggggaggatgctccgaatggttcggagggggatttcgacctgcccgaaacgatgaccgtcgagggtacggacgccgagttcgaaatcgaacgtccgaaaggcgacacggaggaggtgatcgtcgataccgagcagttgaatttattttaggagttaggatatgatcgtttttctggtcggatacatggggtgcggaaaaaccaccatcggccgtcggctcgcccggcggttgggttacgacttcgccgataccgacgaccggatcgagaaacaggagggtgccgacgtgtgcgacatcttccattatgccggtgaggagtatttccgcaaggcggagcgcgggatgctcgaacagctgatcgcttcgggcgacgacctggtggtttccacgggcggcgggcttcccgtctgggcggacaacatggtccgtatgaacggagccggtctgacggtctatatccgccgttcggcagagcagatcgcagcgcgtttgagtcctcacggacgttggaagcgccccaagttgaggggactcgacgaccgggagctggtcgaattcatgtcgcgcaacatggccgagcgggagccgttttacggccaggctgcgctgacgatcgacggcggcgcgatgagcgacgacgaaatcctcgaatttatcactgaaaaactgaaggaacgaaatggataaccggcctgtcggcgtatatgattcggggttgggcggcctgacggtctggcgcgaaatccgccgccagttgccggaggagtcgctcgtctatctgggcgacggtaagaattgtccctatggtgcgcgtccggccgatgagatctgccgtctggcggacgaggcggtcggacggctggtcggtgccggttgcaaaatggtcgtcgtcgcctgcaatacggctacggctgcggccatcgattttctgcgccgcaaataccggcagatgcctatcgtggggatggaacccgccgtgaagcccgcctgcctgaatacccgcagcggggtggtaggtgtgctggctacggcccggagtctggacggcgatctgttccgccgcacggcggcccgttacggggagaatatccgggtgctgaccgccgtaggcgaagggttcgtcgaactggtcgaggaagaccgcgaacagtcgcccgaagccgttgagactgtgcgccgcgtgctggagccgatgatccgcgagggtgccgaccagatcgtgctgggttgtacgcactatccgttcctgctcccggttttccggcaggtgatcggtgaacgcggggttgccgtggtcgatccttcgcctgccgtaggacgcagggtggggcagttgctcgaccagtatgacctgcgggccgaaaaaggcgccaccgcgaattacggatttcttacctttgcggatgaagcgtaccggtcgcggctggaatgcaaggctttcggttagcggctccgcaccggctgcggtccgaaaacggaatcggggggggcggccctttcgaaaccgatcctgcatttgaactttccgaaaaaaatccctaccttcgctcgataaatatacgatatggctaccaagaaaaacagttcggcaaaaagcccgcaggctacctcccgttccaaccgtgacagcatgcgttggatactgggcttgctgctgcttttcgcggggcttttcctgacggcttcggtgctgttttactatttcgactggcgggccgacatgagccttgtgtccggtgtcgaacaggaggatccccgcctggcagacctgtcggatgcgatcgagaatccctgcggttacgccggggcttggttggccgagcgtctggtggggcgttcgttcggcctgttcggtatcattttgcccctgatcgtcacgatggtcggagtgcggatcatccgccagcgtccgctgcttttcaaccattcggtgctcggagctttgttgattctgattctgggttcccttacgttgggcttcgccttcggcgagaagtgggccgttttcggcagcgggtggggcggtgccttcggggtcgaggtcgcccggaggctgacgagcgtgatcggcgtgctgggaaatatcatcctgttgctgggcgcctggattctgacgggcgtgttcatcaaccgcaacttcatcaatacggtcaatacggcaggcaatgcaatggtggacaagggcggcaagatcgtcgatctggtcaaacagtcggtcgtgaatgtcgccgaccatcgttcgaaatccggggaggagaagaccgatcccgagcctgaacccgattctaaacccgaatccgaacggccccagcccgaacccgtgcctgctcccgtcgatgcgtcggcccgcacttccgctgcggatggagcggccgaggtgacgattcagcggcctgcgccggttgcggctcccgttcccgatgagccggacgagagtcccttcctcgaaattccccttacggaagaggttcctgcaacggttgccgagccggctccgtcccgttctgccggaccccgtatcgtggggggcgacgatgtatttaccgaggtcgatctttcgggaggcgaagccgacgctgcctttaccgcaccccgggaacccgagcaaccgcagtatgcgtcggagcccgcgccggtcgtggacggaattacggaatatacgcttacggcggagccggaaattccggccgaaggcgtcgtggtgaccgttgaagcacgcgaggccaaggtcgtggacgagaaaagcatcgagagcagtctctacgacccgttgaaggatctgaacaactaccagcgtccgcccgtgacgctgctcgaggattatacgtccgattcgcaggtgagcgacgaggagatttacgagaacaagtccaagatcgaacagacgctcaaggatttcgggattccgatccagcggatcaaagctacggtgggacctacggtgacgctctatgagatcgtgcaggcccagggcgtcaagatctccaagatacagggattggagaacgatatcgcccagagcctcaaggcgctcggtatccgcatcatcgctccgattccgggcaagggtaccatcggtattgaggtgccgaaccgcgacaagcaggtcgtgtcgatgtattcggccgtgcgttcgctgcggttccaggagtcgaaggccgaacttccggtggtgatcggtcgcacgatccagaacgagaactatgtcttcgacctggcgaagatgcctcacctgctcgtggccggtgctacggggcagggtaagtcggtcggtttgaatgccatcatcacctcgctgctttacaagaaacacccctcgcagctcaagttcgtgatgatcgatcccaagatggtcgagttctcgctctattccaagatcgagaagcacttcctggccaagatggagtccgaggacgaagcgatcgtcaccgacccccgcaaggcggtctatacgctcaactccctctgtacggagatggacaaccggctggaactttgcaagatggcgggagcccgcaacatcgccgaatacaacgataaattcacggcgcggcggctcaatcccgaaaagggacaccgctacctgccctatatcgtagttgtggtcgatgagttcgccgacctgattatgacggcccgcgaggtcgaaggtcccgtgatgcgtctggcgcagaaagcccgtgccatcggtattcacctgattatcgccacgcagcgccccgacgtgaaggtcatcacgggcggtatcaaggccaatttcccggcccgtatcgccttccgcgtgatgcagatgatcgactcgcgcacgatcatcgatcagccgggcgccaaccagcttatcggccggggcgacatgctcttctcgaaggacggggagctgatccgtatccagtgtgcgctggtcgaaacccgcgaagtggagcggatcgtggatttcatcggccgccaacagggatattccgaagcctaccggctgcccgattacgtgccggaatcgagtggcggagaatcctcgtcgctgggcagcgagagcggggctccggtgcgctacgacacgctgttcgccgacattgcccgtgcagccgtgtcgcagggacagatttcgacctcttcgattcagcgcaattacgaggtgggcttcaaccgtgccggtcggatcatgatgcagctcgagcgggccggcatcgtcggccgtcaggagggagccaagccgcgcgatattctcttccacgacctgccttcgctggaggcccgcctgcaggagttgggagtattttgatgcgatgatcgctccggacgaggcttgaatgtgtttgggtattatgaaatagggattgccgttgtcttgtcgtacgaaagcggggtgcggaacactcttcggattggtaattcggaataaaaacgagggagaaaacgatgaattggatcgtattgtttatcgcgggagttttcgaggtggccatgactttctgtttagggaagaccaagggggcccagggtacggagctttatctttggatcggagggttcgtcctggcgacagtgttgagtatgggtttgctggccaaagccgtgcagacgctcccgatcggtaccgcgtacgctatttggaccggcgtgggagctctcggtacggtgttgctggggattttcgtcttcggcgaatcggcgggtttcgcccggattttttttatcgttaccttgttcggttctatcgtcggactaaaattggtttcgcattgaatatattgaataaggatggtcgaaacattcgtgatgtcgattgtcgtttttcggatttttgaattcgaccgttgtcggagcggtttcggagtacatttgcagattcggccgatgtattcgggcgaaaatcgacggaatgacgacggttcggtctatcggagtataatcggaaaaaatatcttatgaaacgatctgttttgttgttggcggcactgtttgccgtgttctctgtccaggccgataaccggccgcaggccgtgttgaagcaactgaccgctgcgctcggagcgctggaggggtacagcgtagtcttcgaggtgcataccgacggggatgtcgtgccgggctattatgaggtgagcggcgacaactactatatgcatgtcaatgggcaggaggtttacggcgatgcggagttccgttacgaaatcgaccccgatcgtaaagaggtggttatcgaccgtgtggatctcacgtcccataatctgctcaataatcccacccgggcgttcgatttcatcgacggcgaatatgccgcctcgcttttgagcgagaagggaagcacggccgtaatccggcttactccgctgcgtatccagtcggccgtcgggcagatcgacgtcgaagtggacacggcccgttcgctgccgacggcagtgatctacgaaatcgacggcgaccgggttcggatcgacatccgttccgtcaccgttcacgaggcgtcgccccgcactttcgatgcggagaattacgccgggtacgagtggatcgatttccggtagtgtatttttcccgatcgtgctggcggtcgtaaatagggcgtgatgtataaaatttgtccgaacggctttgaaattccccgacactttgccgggggatttttttgatgttgtcaaaacggctgaaaagggctgaaaatggtgtgtgcggtgaaaaaacttgcggaaacgggtgattttattgggtccaaagttgcttattcgacgaataaatgctatttttgtgtgtttatagaatgtattttcggatgttttcgataagcgggaaccgacgaatagactcgtcggaccgagcgaagagaacaaagaacgtaagtccgctgttttcgatcgggcgaagaagtagtccgaatgtagaaaataaggggtaaagttcgatgttttcgaccggcgaagggcggcgcgggatgcgttcgggccatgccgggcagagaaaacgaagagagaaactcaaagaataacatgctgacagaagaagaaaagaatgccggattggagggaaaaatcattcccatcaatatcgaagagcagatgaagtccgcttacatcgactattcgatgtccgttatcgtatcgcgtgcgctgccggacgtgcgggacggtttgaagcccgtacaccgtcgtattctttacgatatgagtgcggaactgaacctctactccgacaaacccacgcgtaaatccgcccgtatcgtcggcgacgtgctgggtaagttccacccgcacggcgacagttcggtctatgaagcgatggtgcgtatggcccaggattggtcgatgcgctacccgctggtggacggtcagggtaacttcggttcgatggacggcgattcgcctgcggcgatgcgttataccgaggcccgcatgcagaagatcaccgatgaggtgatggccgatatcgacaaggatacgatcgattggacgctcaacttcgacgatacgatccccgaacctacggtgcttccgacgaagatccccttgttgctggtgaacggcgcgagcggtatcgccgtcggtatggcgaccaatatggcgccgcacaatctgggcgaggtgatcgatgcctgctgtgctttcgtggacaatccggagatagcatgtgaggaactgctcaagtacgtcaagggccccgatttcccgaccggaggaattatttacggctacgaaggggttcgggaagcgttgctgacaggccggggccgtgtggtcatgcgtgcccgcacggagatcgagcatacggccagcggccgcgagtgcatcgtcatcaccgaaattccctatatggtcaacaaggcggagatgatcaagaagatcgccgaccttatcaacgaaaagaagatcgagggcatttcctatatcaacgacgagtccgaccggaacggcatgcgtatcatcgtcatcctgaaacacgatgccgtggcgagcgtggtgctcaatacgctgtataagaatacgccgctgcaaacctcgttcgcggtgaacaacatcgcgctggtgaacggtcgtccgatgatgctcaatctgctggatctggtgcagcatttcgtcgagcaccgccacgacgtgatcgtgcggcgcacgcgcttcgatttggccaaggccgagaagaggctgcatatcgtgttgggtctgctcatcgcgcaggacaacatcgacgagatcatccacatcatccgggcagccaagaaccccgacttggccaagcaggccatgatggagcgcttcagcttgagcgacgcacaggcttcggccattatcgagatgcgtctacgcgctctgacgggactcgaacacgacaagctggttgccgagcgcaacgagctggaggcgcagatcgcttatttcaacgatgtgctgggcagccgcgaattgcagatgaagatcgttaaggacgaattgttggaggtgaaggccaaatacggcgacgaacggcgctcggagatcgtttacgcttccgaagagttcaacccggaggatttctacgccgacgacgagatggtcatcaccatttcgcacctgggctatatcaaacgtacgccgctggccgaataccgtacccagaaccggggcggcgtcggcgccaagggcagcgcgacgcgcgacgaggatttcatcgagcatatctatatggccacgatgcacaatacgatgctcttcttcacggagaaaggccgttgctattggctcaaggtttacgagattcccgaagggacgcgctcctcgaaaggacgggcgattcagaacgtcatccagatcgagccggacgacaaggtgcgtgcctatatcaacgtgaagcgtctggacgatgcggaatacgtgaacaacaactatatcatcatgtgtaccaaggacggcacgatcaagaagaccaaactggaagcgtactcgcgtccccgtcagaacggcgtcaatgccatcgtgatccgcgagggcgaccagttgatcgaggccaaactcaccagcggcagcgccgaggtaatgatcgcggcccgggaaggcaaggcgatccgcttcaacgagaacacggtgcgtccgatcggacgtgtcggggccggtgtgcgcggtatttcgctcgacgaaggcgacgaggtggtcggcatgatctgcatcgaacccaatagctcgcaggacgtgctggtactcagcgagaacggttacggcaagcgtaccgatctggacgaataccgcattaccaaccgcggcggcaagggtgtgaagacgatcaacattacggaaaaaaccggcaagctgatttcgatccaggctgtgaccgacgagaacgacctgatgattattaaccgttcggggctgacgatccgtacggcggtagatcagatccgtgtggcgggacgtgctacgcagggcgtgcgtatcatcaacctgcgtgagggagatgccatcgcttcggtaattgccgttcccgccaacgaagaggaggagccggcggtcctcgatggggcgggcgctccggaatccgagtccgaagagaacgttagtaaagaacaatagaagataatacctataaattaaaaaccccgttcattatgaaaaaacttattttggccctggccgccgttgccttgttgggaactgctgcccaggcacagaaaatcaacaaggaggccttgttgcagaagatcgaaaagaacgaaacggcgagtgccgatgcgaagaagggagcgaaagccgctacctggctcaatttgggtaagagctatgtcgaggccatactcgctcctaccaaagacctctatgtcggagaactcggcctgcagctggatatgacattcggcagcccgaagtcgatcgacgaagtgacgatcaacgggatgtcggtggccgcacagaattacgattatttgaccgtttatgtttccaatggacaggtcatcggctggaaggagatagaacctgtaaaggaaggtgctatcgataaggcgatcgctgctttgaacaaggcttacgaactcgattccaagcagggtccgaaagtcaaggagcagcttatggcgatcagcaactactgttcgcaattgggcgatgcttgcaataatatcggtgaatacaaactcggttcggaggctttcgaaaccgctttccgcgcggagatgagtccggcttgcggtactcccgacgcttcgcgcctttactatgcgggctatctggccgctgctgccggcgagaaggacgctgctgaatatgctcgcggcgtggaattgttgaataaggcgcttgaaatgggatatacggatgacaacggtatgatctattactacctgttccataattattatggccagcgtgaggcggaccgtgccaatgtcctgaaagccaaagacgccctgatgaccggtattactaaattcccgaagaatcaggatattctcaagagtttgattatgttgtattcgatggaagagggattgggcgattcgtcggaactggttacgatgctcgacgatgcgattgccggtgatccccagaacatcgaactgtggttcagccgtgcccagatcttcgtttcgttggaggattacgatgaggcgattgcctccctggagaaggcgatcgaactgaatcctcagtcttatgaagcgcagttctttacgggttactacatcattatgaaggccgatgcactgaatcaggaggccaatgagaaagaatataccaatgcgggcgagtatgaagccgaccagaaggagattctttcgatctattcgcaggctgttccctatctggaagttgcccatgagattatgccgcaaaatcccgatcccgtacagctgctcaagactctttgctatcgtctgcgcgacgaacccggcatgatggagaaatacgagaaatacaacgagctttacaaacagatgtaattcgaacgttggtttccaaataaagcccggagcaagacgctccgggctttttgtttttcaaccgatcactttgtttacagacacgtttgttccctgtaccgaaatggcggcagcggtgcgaagaggaaagttccgtataatcttttcgttactgttgaaaaatttattgcagtacggtgtatgcagtagttgaagaggaagggatctgccggacgaagaaccccggttatttggatcggcggagaggaagggccgtcctttgcagggcgaagatacgtcgggaaatttatgccgcagcttttcgatagatgagccgcaggcgccgggtcatcaggagttgcagcgtgccgcgcaggaacatatagagcgtgaaggccagccaaagggcgttgtttccgatgacgggatagagcgagtagaagataccgaaataggcgacggtcgagagcagcatcgaattgcgcatcactttggtttcggtcgcacccaccatgataccgtccatgatgaagggcatggcgctggccagcgggatgaggatgatccagacgatgtaattacccgccgtcgaaacgacctgtgctgcgtccggagttccggccttgatgaaaatgcctaacaggtcgcgccaccagatgaggtatatgccgacgaacagcaccgagatcagtgtgccccagcccagacaacgtcccaggcagcgacgcagcgattgttcgtcccgggctccgatgaagcgtcccgtgagggcttcggcggcataggcgaagccgtcgttcatgtaggagaaaagggtgaatatctggagcagaagcgtattgaccgtcagcaggatcgggtcctccatacgggccgatgccgccgtgaagaaggtatatacggctacgatacagagcgtacggacgatgatgtcgcggttgatgaggaaaaatttccgcaccggttcccagtccaccacttcacgccacgtaaaccgtgtgagaattttgcggtatcgcaggataagcagcaggaccgccagcaggacccccgtattttgggccacgaccgagccataggcgatgcccgtgatgcccatgccgtgtccgaatacgagccacaggctcgtggaaacgtgtacgatattcaccgtgacggcgatacacatcgggatcacggcattctgcatgcctgtgtaccagccgttgaatccgaagagcatgataccggcgggtaccgcccagatgcgggcgtagaaatagtcgtgtacgatttcgttgccgttcatggcccatagtgccagtcgccccagagggttttggaagcaaataaccagcaggccgaggatcgctgcgaccaggatgccccggacgagcatgttggtgcattcgtggaaatttcctgcaccgaaagcctgcgccgtgagtccgctggtacccatgcgcacgaagctgcagttccagtagatgaagttgaagatggatacgccgatggcgagtgccccgatcgtcgctgcggagttgtccaggtgtcctgcgacggcggaactcacgatacccataagggggaccgtgatgttggagatgatgttcggagcggctaatcggaggatttctcggttcatgtcctgggttttgatgcgcaaatatacggcttttacgggtaaggggaaatattttggcacggtatttcgatcggatttccgcagggataatcctctttttccggaaaatagcggctgtcggtgccgttatcccgaaaattcgattacctttgctgcctgcaccggtattttcggccggtgcggaatgccggggttttccctgttatgcaggggaaatcgagtgaaatcgccgatttgggacctggcgtcgtaaaacgccgtagcgtgagttttgcgggttccatcgacgattgcgatttccgggaatacgacttattaaattcgcaaaactcacagaatcgattatgaaagatttcaaaaacgactcggatacgacgttggcccgcttcgggcgcgataagcgggcgcgtatttcctctgcggagcgtatcgagcgtcgtccgcgtttgcagcgtgatgccgccgattcggagcactcttcggacagccgtccgcgcgcatcttacaaccctaattttacgagcgacaaccgtcccgtgcgggaagaccgtgcgcaccgtgacgattcccgtcgtttcgggaaccggtcgttcggttcggacgaccgacgtaggaacgatgctgcagatcgggagttcaagcctcgtttttcggagcggaaagacgggtacgcttcccgcccgtacgaggataacaaaccgggcggtttcaagaagttcggcaaaccttacggtgagcagaaggaggggcgcgaccggtcattcggcgatcggaaatccggcggttatagccgttcggacaaaccttacggcgaacgtcggtacgacgaccgcaaacaggacggttacaagacattcgataagccttacggtgaacgccgttccgacgatcggaaatccggtgggttccggggcggcgaccgctcgttcggccgccgggacgataagttccgaagttatcccagatacaatcccaacaaaccaacgggcgagatacgcctgaaccgtttcatcgcccagtcggggatctgttcgcgccgcgaagcggacgatttcatccaggcggggctggtgaccgtcaatggggtggtcgtgacgacgctgggaacgaaagtccagcctacggacgaggtgaaattcaacgacagccgtgtcgagggcgagaagaaggtctatctggtgctcaacaagcccaagggttacgtgacttcgctcgacgatccccacgccgacaagacggtcatggagttggtgaaggacgcctgtacggagcgtatctatcctgtgggacgcctcgataagaatagtgtcgggctgttacttttcaccaacgacggcgatctgacccgccaactcacgcacccttcgttccagaagaagaagatttaccaggtgtcgttggacaagcccctcaccaaagcggatatggagcagatcgctcaaggcattacgctggaggacggcgagatctatgccgatgagatcgcctatgtcaaggaggacaagacggaggtggggatcgagatccattcgggccgcaaccgcatcgtgcgccgtattttcgagcatctgggttatgcggtcaagaaacttgaccgtgtttactacgccgggctttcgaagaaaaatctcaagcggggacagtggcgcttcctgacccgcgaggaggtgcagcgcctcaagtcggggcagtatgaataggagtgacgcccaagcgatgtataaagaaagccgaaatccaaagatttcggctttcttgtcggatgttccatcgaggatttccgttctgatccgtcggatcagtgggtcgcccggtaccaggaggtctgtgcccattccggggcgaatcgttcgcacggggcgctggtcgttacgccggaatattttccgtcttcgatcgtatgcatcccgttcggagcgtcgcccaatccatataccgagtagaacgaaggcgtatgcagccggctttccgtcgggaaggcctttcccatttgtgctctgaacttatcgagcagcggatccttttcgtcgcagatcgcctcgatgtatccctgcaagtcgtagaatacatgctcgtcgagcccttcgtaggtttgcagcgatgcccggtcgtacgttttccccggatacttcgtttcgatctccttgacgatagccgccagcggctccagttcgccggtgaccgtcagggcgatgcagcctgatttcgtggtcgcgcggttcatgtaatagtcatagtattcgctgcagacacccggcaggtcgtaacttgtgcctgcatcggcgagcaggtgcggcagaatatcggtgtagttgaaaccggcggccatcacttcacacggtgaagcgatgatgcgatcggcacaaccgcgaagatcgtacaatgcctcgatcgaagacatgaagcaggcgtcgaagagaaggtagtcgaaatgcagccccgtgttgccgaaggccgctgccagttgcggaatttcagcccgcttgccggaatcgcccatccagcgggtcggcagggcattcggcatcgggctccagaaatcctggaatgcggagaaccggatggcattgaccgacgtaccgtccgggacccaacccagcccgtgtccgccgaggatcagaccgtatcgacgtgccggagcctgttcggccatgtaggagataacttcggtgatcgtacctctgtccatcgagttgaagtcggcgtccgcccagcggcgcagggtatcgaccttgcagtgttcgtacgagaactgtgctccgggtacgtaatcgtcgttgcggggcgtatagtagagttccaataccatcgaaaggcctctttgaggctggatgaaaaccagtacgcgactgttgtggagtatgttccggtcgatggcgttcatcgcgtcatcgacattttcctgaagtaagaccccaggttggttcctgtcagatagaacataatggtctggtccgccgtttcggggaccggcgggcggggagtgaccccttcgtccttgttgcagcccgtgaaaagggtcgctgcgagtgcaaggacaagcactatatgatgtaattttttcatttggatctcgttcggggtgtttcgtgcccgttttgtgaaggttagaaatactcccccccccgcgtagagaggagggtgcctttgcaggatgattcggagaaaagagttgttttcatcttatacttttataataaattaggccgttgaattatgccggggcttcaagagcggttttcgttatttgtattctctcggacgcaggttgttgaattgccaggttcggggccgtttgaatacgtagtcgtcgggtttgttccggtagatgcggctgtaatcgaagtaatatcccttgatccgcccctcttcggtccgtaccggctcgagcagggggacgtattccaccgagcggctgacgacgcgtgctttgccgtagtgacggtcgtgtgcggccagcagatcgagagcatgtccgaacatcaggatatgccaggcgctcccttccttgaggccgttgccggaatcctcgatcgtcgccaggatggagttcatccggttgtagttgatctgttcgttcttcgagtcgccgagcgctccgtaagcgaatgccagcaggttcagcagtttggggctgaacggatcctgcaccaaggcatcgttcaccgctgcgatcagtttctcgaggctttcgtgcgtcggattctcgaaatcgaccgtttgggcgatcagtatggctttgtccatgtccgaattggcattcaaaggcttgtaggcgtcctgataggcatatccgtagtagaggtagtggtagtcctcctcggtcatcgagtcgtcgcccgactgataccgcagcatcaggttcgggtagtagtagggggattcggaatccagcgtctgccggataatatcctcttcgacaggtattttggccgttgccatcagaggcagaaacagcagcaggacaagcaattttctcatagccttttgtgtgcggcggttcagtgtgcgaatacggtgcggaacccgtttcgtgccgcattgttatataaacgtgcgatcaattcaaatcgtatttggcgatcagttctttgaagcgggcttcgagctgcggggttccgggaacgaggggcagccgcagcgtgttgccgatgagtcccagtaccgacatggcgcatttcacgcccgtcgggttgccttcggcgaagagggcggtcacggcctcctccagacattcgtaagccttgtgtgctccttcgaagtcgcccttctttgccaggtcgatgcaagtcatcatcttgcgcgggaaggcattgaccgctaccgagatcacgccgtcggcgccccggctcatcaggtcgagcgtcagggcgtcatctcccgagagcaccagaaaatccctgctccgccagtcgagtatctcctgaatctggtcgatcttgcccgaagcctccttgatgccgatgacattcgggaagtcgcccgcaatgcggatcgtggtcgctgcggtcatattgacccccgtacggccgggaacgttgtagagaatgatcggcaggggcgaatgttccgatacggttttgaagtgctggtacaacccctcctgcgacggtttgttgtagtagggtgtgacgctcaggatcgcatccgccccccgcaggtcgaattcgcgcaactggtcgagcacttccgaggtcgagttgccgcctacgccgatcaccagcggcacgcgccctgcgatgtggtttttgatgaacatggcgaccacggcccgttcgtgcaggtagagggtcggggtttctgccgtcgtgccgagtgcgacgatgaaatccacaccgccgtcgatgatgtagtcgatcgtgcgggccaaagccggataatccacccgtccgtcgggtgtgaaaggggtggggatggctgcgccggcgccgctgagtttgtgtcgtgtcatatcgttgataatgttatatttgataattatatccttgaacgcttccgaggcttcgtcctgtttttcgaatccgttcgcggccgttcgtggccgctgtctgcgtatttgcatcccgtttcccttgaatttccttttcggaaggagtcggaaactgcccggccggagcctggcgagcgtaggagcgagaaaggagttcgttcgtattattctgattttttacatcattattttcggtgtcagggcatgcgcccgaaataatattgtgcgttttctcggcccggggagtgccgtttcccgcctaaaacagcgacccctgttccgtgttgccgccgtcggttttgtcggtcgtttcccgagccgacgggggtgttgcagacgtgttcccgtccgaagcgttctctgtcacgggcagcgttccgccggaagcgatcatcgccagcagttcctcttcggagatgagacgtacgcccagtttggtcgccttttggagtttcgccggtccgatcttttctcctgcgaccaaaaaatcgacgttggccgataccgccgcgaggtttttaccgccgtgcgcttcgatcagttccttcagttcgtcgcggctgtgaccggagaatctgcccgtgatgacgaaatttttgcccgccagactttccgattcgagggctttgtgcgcggcttcggtttgcagccccgctttgcgcagccgctcgatgatccgcaggttctccgcgtcggcgaagtagtcgatgatggcatcggcgatcttgccgcccacctcgtcggcttcgatcaactcttcgcgcgtggcgtgcatcacggcatccaacgtgcggaagtgtgccgccaggtatttggccgtggtttccccgacgaatcggatgcccagggcgaacaatacccgctgaaaaggaacctcgaccgagccccggatgctccggatgatgttctcggctgatttttcgcccagccggggcagacaggcgagctgttcggcccgcaggtcgtacaggtcggcgatgtcgtgcagcagtccgttttcgaagagcagttcgacggtctcttcgcccaatccctcgatgtccatcgccttgcggcggatgaagtggatgatgcggcccagtatctgaggccggcagtggctctgattgggacagtagtgcttgctttcgccctcgtatttcaccagcggagtgccgcattccggacagcgggtgatgtactggaagggacggctgtccgccggacgggccgcaagatcgacgcccgtgatcttggggatgatctcgccgcctttttcgacatataccatatcgcctacgcgaatgtccagcagggcgatctgttcggcgttgtgcagcgtggcccgcttgacggtcgttccggccaactgcaccggatcgaggttggcgacgggggtgatggctccggtgcgtcccacttggaaatcgacgctttcgagccgcgtgagcgcttgttcggccttgaacttgaaagccacggcccatcggggcgccttggccgtgaagcccagctcgcgccgcagggcgtaactattgaccttgatgaccacgccgtccgtagcgaacggcagtttcctgcgctcttcgtcccagaaggcgatgtagtcgtcgatctccgcctggctgcggcagatccgcatcttgtccgatacgttgaatccccattcgctggctttccgcatacactcccaatgggtcgtgcagggcaggtcgtcgccagccagttggtagagcgtgcagtccagcccccgctgggcgactacggccgaggattgctgcttgagcgtgcccgctgcggcattgcgcggattggccagtagcggttcgccgttctcctcgcgttcgcggttgaggcggtcgaacgaggcatagggcatcagcacttcgccccgtatttcgaaaaaatcggggtagtcgcccccttgcagatgcagcggaatggtgcggatcgtgcggatattggccgtcacatcgtcgcctcgcgtgccgtcgccccgcgtcacggcacggagcagggctccgtgttcgtaggtgagcgagatggccgtgccgtcgaatttgagctcgcagacgaactccgtctgtccgagctctttctcgatgcgtccgatgaattcgtgcagctcgtcgagcgaataggtgttacccagcgaaagcatcggaaagcgatgttcgacgctttggaattcggttgtgagatcgctgccgacgcgggccgtcggggagttcgggtcggcgtattccggatgtgccgcctccagttcctgaagctcacgcatcataatgtcgaattcacggtcggatatttccggactgttttcgacgtagtatttatggttgtggtagtcgagtgtgcgacgtaatttttctattttttcacgtatcatacctctgttattccgtacgtaaaagtacataatttgtgcggaaagaccgcaaaaaataaaaaaaatgcaaaaaaaaattcgaccttgattccgatcgccaaattttgtttatacttgcacaaaattttcagacgtttccggttcgcggagacggcgaagcccgaaaaagggcgtcgccggacgaaggaaaacgacggatgaaactccacacgatcgaccggcgacggcaggtacggaatcctgccgggcttggatatgacaaagaaaattccgcattttcgacaagtgggaacggagcggagcggaggaacccgctctgccgaacgaaacgactattgaaaacgaacatcgaaatatggcaaactctacaacaccgaaaaaacgccttgtcgccagcttccgtaatctgccttcggaacttcaggaggcaataaagcaaaaatatcccctcggattctccgaggcgatgatgcgcatcgacaaacctaacggagagtttttttacgctgtgcctttcgaaacggacgagatcaattatctggtgaagattgacgtgaagatcgacgaccgtgcggacgatgacgaagataaggactattacgacgacgatatcaaaggcgccgacgatttgcaggacgacgacaattcgggcgacgacgaggaccgggacgacatgtagttttcggaacggaaattgttttcccattcatcaataatattattatcggggatattcggacatttttcgaaaggtggggcggaccgaatttattcgaggtccggtgtgttcggagcctggatgacattcggttctgacgagcgcggttccaccctggcgggtgcgaaggacggcggaaaggtcgatctttccgctcctccggccgagccgaatgtttccggacgacccgatatggaaaacgatcgctgaaaatgaatcctttcatccgaaaaataggttttggagttctgcttgcgactctcttcctgccgctgcactcctgcgggctgggagaggattcgcgcgatgaagataaccggtacgtttatcttcggtttgcggatccggccttcgaagcatactgtttggagcattgggatctgaacggcgacggtcgtatttcccgttatgaggcccagcgggtctgggatatggactgttcgtcgctcggggtcaagacgctggcggggattgaggaattcacggctctgcgcaagctcgattgcagtggcaacgagatcgtcgcgctcgacgtgcgcaaatgtattttcatggagcagctgaattgcagcggaaatgcgcttatcagtcttgacatcaaaggattgcgctttctaaaccggctcgattgcagcaataacgacctgacttatatcaatttggctaccaatgcggctttggagaatctctggtgtggcggcaaccgcttcgcatcgctcgacatcagccattgtgctacggacatgatccgtgtcgatacggtccctaacgagagcctttcggtgctctacaaacgggcgggacagcgtatcctgaacctgaacgtggacggcggtacgaaagtggaggatttgtagctcggaatattctgacggttaaaccataagcaagtgtcttcgaaggggacacttgttttttgtgtcggaattttgagatttcgacagccccgaaggggtttttaacgaaaaattagtacctttgaaggcaaaatcgtttttttgcgattaaatttttcaaaaagatcatgaataaagttgacgtcatactcggcctgcagtggggcgatgagggcaaaggcaaggttgtcgatgtgctgactccccgttatcaggcggttgcgcgttttcaaggcggtcccaatgcgggccatacgctggaattcaacggcgaaaagtacgtcctgcgctcgattccttcgggcatatttcagggcggtaaaaccaacatcatcggcaacggggtggtcctcgacccgattcttttccgcgaggaggctacggcgctggccaagagcggccacgacctgaaggggcgtttgcaaatttccaagaaggcccacctgatcctgccgactcaccggatgctcgacgccgcgcaggaggcggccaaaggcagcgcccgtatcggtacgaccggcaaggggatcggcccgacctatacggacaaggtaagccgtacgggtatgcgtgtcggcgacgtgctgggtcctgaattccgggccgtttacgaccgggtgaaagcccgtcacgaggcgacgctccgcagtctgggatatgtttacgatatcgcggaactcgagcgccagtggttcgatgcggtcgagtatctcaaggagttccggttgatcgacagtgaatacgaaatcaaccggctgctcgccgaagggcagcccgtcctggccgaaggggcccagggtacgctgctggacatcgatttcggctcctatcctttcgtcacctcctccaatacggtttgtgccggtgcctgcacgggtctcggcatcgctccttcgcgtatcggcgaggtgttcggtatcttcaaggcttattgtacccgcgtgggggctgggccgttcccgaccgagctgttcgatgaaacgggcgcccgtctgcgggatctgggccatgaatacggagccgttacggggcgcgaacgccgctgcggttggctggatatggtggcgctcaagtacgccattatgatcgacggggtgacgcagttgattatgatgaagagcgacgtgatgaacgatttcgacacgatccgtgtggctacggcctacgagatcggcggtgagcgtacggaccgtttcccttatgcagtagatgctccgatcgtgcctgtttataaagagttcaaggggtggaaatgcgatcttcgcaaattccgccgctacgaggatttcccggccgaattcaaggcttatgtggagttcatcgagtgggaaacgggcgtgcccgtgcggattgtttcggtaggccccgaccgcgatgaaacgatcgtgcggtaaatacagatacgagtaaaatttattcatttaaaatagtacaaatgaaaaaacagttgaaaattgttgtcctggcaaagcaggttcccgatacccgcaacgtgggtaaggatgccatgacccccgaagggacggtcaaccgcgctgcgctgcctgcaatcttcaatcccgaagatttgaatgcactcgaggctgccctgtttctcaaggacgaaacggaaggcagtacggtacatatcctgaccatgggtcctccgcgtgccgccgacatcatccgcgacgccattttccggggggccgacggaggttatctgctgaccgaccgtaaattcgccggctcggatacgctggctacttcatacgctctttcgtgtgcgctgcgcaagattcagcccgacgtgatcgtcgcaggccgccaggccatcgacggcgatacggcccaggtaggtccgcaggtggccgaaaagctcggtttgccgcaggtgacctatgccgaggagattctcgagatcaaagataagtcgctggtcatcaaacgtcgcctggagcacggaaccgaagtggtcgaatgtccgattcccgccgtggtgaccgtaaatgcttcggctgccgagtgccgcccgaagaacgcccgccgcgtgatgaagttcaagaatgccatgacggcctccgagatcgctgcggaaccgacgtcggaagctgccaagatggccgcgtcgaagccctacctgcagattttcgagtggagtgccgccgatgtcgatccggacgataaccagttgggcctgaccggttccccgacgaaggtgaagaagatcgagaatgtggtgttccaggccaaggaagccaagaaactgactgccgacgacaagcagatcgaggaattgatggttgaacttatcgcgagccacacgctcggttaatcagggaggaaacgagatatgaataatgtatttgtatatatagaactcgaaaacggggtacctgcggacgtgagtctggagttgctgaccaaaggccgcgagctggccacgacgctcggcgtgaagctcgaagccgtcgtactgggtcataatctgggcgatatcgccaaggagttggccaaatacggcgccgataccgtgtggacggccgacgacaaggagttcgctccgttccgcacgttgccccatacggctgtgatgtgcggtctgatcgagcaggagaagccccagatcgcccttttcggtgcgacctccatcggccgcgatttcgccccgcgcgtatcgtcggcgctgttcagcggtctgacggccgactgtacgcagctggtgatcggcgaccataaggacgcgaagaccggtacggagtataagaatctgttgtaccagattcgcccggccttcggcggcaacatcattgcgacgatcgtgaaccccgaccatcgtccccagatggcgaccgtccgcgagggcgtgatgcgcaaggagtacgcagccacgccgggtgccggcgaggtgaagccgatcgactggaagaagttcctgaaagagagcgacctggtggtcaagatcctcgaccgccagatcgaagaacgcaagatcaatatcaaaggcgcgagcgtggtggttgccggtggttacggcgtaggctcgaaggagaatttcaagctgattcacgaactggccgaggtgctgggcggcgaagtcggcgcgagccgtgctgcggtggacgcaggtttcacggagcatgcccgccagatcggtcagacgggcgttacgatccgtcccaaactctacatcgcgtgcggtatttcgggccagatccagcatacggccggtatggaccagtcgtcgatgatcatctcgatcaacaccgatcccgatgcgccgatcaacaagatcgccgactttgcgatcacgggcgacctgaacgaggtgattccgaaaatgattaagtattacaaacaaaactcgaagtaatggctaatttctttttagataataaggatttgcagttccaccttcagcatccgctgatgcgcaagatcgtggcgctgaaagagcgtaactatacgctgaaagaccaccacgagcttgctccgcagaattttgaggacgcgatggacaactaccgccgcgtgctggagatcgccggcgaagtgtgcggcgaggtgatcgcccccaatgccgagggcgtcgatcacgaaggtcccagagtcgagaacgaccatgtcgtttacgccgagggtacggcccgcaacatcgacgccattaccaaggccggcttgagcggcatgaccctgccttacgagtacgacggcctgaatttcccgctggtctgcttcgtcgtcgccaacgaaatggtggcacgcggcgatgccggtttcgagaatatctggggtttgcaggactgtgccgaaacgctcaatgaattcgcttcggaagagcttaagcggatgttcctgccccgtgtttctgcgggcgagacctgcgcgatggaccttaccgagccggatgcaggttcggacttgggtgccgtgatgctcaaggccacttacgacgagaagagcggccgttggctgctgaacggcgtgaagcgcttcatcaccaacggcgacggtcatatttcgctggtgctggcccgcaccgaagagggaacttcggacgcacgcggtctttcgatgctcgtgcacgacaagcgtgacggcggcgtcaaggtgcgccgtatcgagaacaaactcggtatcaagggttcgcccacctgcgagctggtcttcaccaacgctccggcccgtctggtcggcgaccgtaagatgggtctgatcaaatacgtgatgtcgctcatgaacgctgcccgtctgggtatcggtgcacagtcggtgggtctttgcgaggccgcttaccgcgaggcgctcaagtatgcgcaggagcgtgcccagttcggcaagccgatcattcagttcgccgccgttgcggagatgctctccaatatgaaggcgaagttgcagggtgcccgcgcgctgctctatgaaacgacccgtttcgtcgagatttacaagcagtacggccacatcgcgcaggagcgttcgctcgaaccggaggagcgccaggagatgaagttctacaatcgtctggccgacggtttcacgccgctggtaaagctcttcgcttcggagtatgccaaccagctcgcttacgatgcggtacagattcacggcggctcgggcttcatgaaggactatccctgcgaacgcctctaccgtgatgcccgtatcatgaatatctacgagggtacttcgcagttgcaggtcgttgcggcgatcaatgccgtgaccaaaggtacgttcctggagcagatcaagacctacgaggctgcggactatgcccccgaaatgtgcgccgtgaagagcaaactgaccgacctgcgcgtgaggttcgaggagatggtcgcccgtgtcgaaactctcgagaaggagtgcagcggctataaggatttccatgcccgccgtctggtggaaactgccggtcatatcatcattacttacctgttggctcgtcaggctggagaatcggccgaatacatcgattccgcgcggatctattgtaaactggcagaaagcaaagtcgccgaagcctacaattacctgatgcattcggatgtcgaggatgtcgatctgttcaaaaaggtcggccaggaggaggcgatcggttaattgccgtcggatgttttgaaagggaagcggtgcgttgtaccggcgaaactttcgaattcgatatatgttgagaagggaagcgaacgaccgcttcccttctcattgattttggcgggaattttgtaccgtgacgaaagggcgggttatttattaaaaattatttttgtattatcctataatcctgacagtgacagttatgttgaaaaaagtgcttctgatggcggccgttgtgttgctcggcctgcccggtctggctcatgcccagttggggcgcggtgaaatttcggtggggtacggagtcgctcccgtgaccgactggatcgacgcttacagcgataagttgctcgacgtgctcgatatgaaggatgcgtcgatggacagctggggcggtgtgtcggtcaattacaccttccgtatcgtcggcgggttgggtgtgggcgctactttcgtctattcgggtaacaatcagcggttggccggtaagaaaatctcgaccgactattattcgatcatgccgcacctgaagatgcgctggctcaacctgcgcatcctgtcgctctattcccgcatcggtgtgggcctgactttcaccgaatcttcgggcgaggggcagagcgaatcggcccggcagtgggcttttcaggtttcaccgatcggtgtcgaaatcgggggcaaggtcgcggcctatgccgaagcggggatcggtacgatgggatcgcttgttgccggtcttcgcttccgcttttaacggatcggtccagtgtaggggacatcgccacggaccggctgtccggtcggttcgagaaggagaggtgctgtgtcgctttcgcaaggattttgcgcctggcatgcgatgccggcgatttgcctgcgaaagagcgatcgtattcgaacgagagggagaggaagatgtggctgacgtttcgatttgccagaatcttcggaaagaacgaaaaaaacaggatctcgaaattgcattgcttcgaggtcctgttttttcagtgccgatcgcgggggcgattggctgttctttaagccgcattcccggccgcttcgtattcggccttgatttcaaggtaaaaattcgcgaagacagtttggtaataggggactatccacagcatagcgataccgagcgtgagcaggctgagaagcgaccagccgatcatgccgagctgcatgagaaataatcgcatcttgtgtccgcgcatcattgccatactgcgttcgatcgcctcgtcgcagccgatttccggattgtcggatacgatgtacagcgccattgcatacgacagtcccttgatgatgccggggacgatgagcagcaacgtccaaaggaacgtgtagattccagataacaggcccgttccgatggctttccagtaataggtattgttgaatgcgcagaacagtccttcgatggtcagggggcgcttgtcgcgggcgaatgcgaggaatgttcgcagaagcccgaagttgatgggcagatagacgaagatcaggagcaggaccgcaagacctgcaatggctcctcctctgttgaggatgccgtaagggacatagagtacgcaagatacgacgtagagcaggatcgccgatccccagttccccttcattgctgcgagggacgattgtctgatttgggaatttgtttgcatagtggaggtttttatggtttctttttatgggggtaaaaaccaaatgtacaaaagaagagcagcgacagaaagataggtaaccggtatatatcaaacggttagcagcacgatacccccagatgcaccgcgaaaccaaatgttacttcggtgatactttcgtgttacatttgaaccagatttgaacgcggtgttcgacctccgatgttacattgcctccgaaaacggccaaaaacggtcaaatttcggaggctttttgatatctgcgaccgtaggtcggatttgcgactgaggctgtttgtgctgcgatttcagccattggtaggcgtgtataggtgacgccagtcgagtatcgtatttttatcgttcaaacggccgttcaaaccctcaccaaacaaagcaaggtcgttctgccatttcggcagtcatgttctatgatctgagatttagacggccacaaaaacggccgttaaaactgcccctgttttttcgtgtttcaaaacgaaatatccacgttaaacagccattaagactgccaaaaacgtgaaaaagagatgcacctaaactaacctttaactaccaaaaccgtgcaaaaatgcaggaaaatggaggtatatgtacccccttaatgacacactttttacaaatttcaatcgcttatttttgtataatcgtctaaaaaacagcggcaaccgttcaagttgccgctgtttgctgtttgaaaaagtgcgcgtgacacgcatttatcccatcgtgttgaatctcacactcgcctttaccaatgccagtgcttggatcgagtcggcggggatatctttcggtgaatggtgtgggttgtggctaacgagccggacgaaacgatcgtcatcagctttttgtatatacttgatagtaatatagtcctcgccgtcaagcgtgaacgatagcagatacatctcgccccataatatactactcgtggcatgaggaatctctttatataatataatatctccacttttcagaagcggatacatagagtctccgcgaacatataatgccccgtcgcatggcggcagatcgggaatttgcaaatggctgaccggaacctgtcgggtcgttccatcgaagagggccaccagtccagcggtagcgtcgagttcatacagcgggacgctctgcattccaatcgtgcgatctgtacggagggagaactgctccttgatggcgggaatggccaactgtcgatcttctgcgcgctgcatttcacctttgccggtcagtagccattcggcggatatattcgcatttgcgcatactttttcaagaacatcatatgacggttttccttttcgagtcccaactacattttccacgacagttgccgatatgccaacgctctgcgcaaatgctcgcttatttcctttatataaggaatttataatctcttcaaatcgggcgtttatattcattgttccaaaattattcgcaaaagcgaaaattattcgcgttttattttgaatattcgcatttgcgtattatatttgcatcgtcttaatatattagggcgctataaaggtagtgaaaattttgaatcaaggctatgaaagaggaaatgaagaaatggcaaacgcaaagcaacaagaacaaggtctgtttttacctgattacacgcggtatcgcattcagttatacggagaagtccggaattgttttcgaagcgtccgcttccttcgtgaagcgcatgtccgacgctttggtaacggcttacggttgttccttgagaccgagcatcaatgaagtaaaataacccggcgatatcccgatgatggcatttcaaagagatactgtctgactacttgtagaaccaaacataaccaagagaatgatgaaatatatcgaattatcgacttctaaaaaagctcgcatctgtcgggcgttgggggtaagccgtgtaacgctgtggtcggccttgaccttccagacccagagcacgttggcagaaaagattcgccgcatggccgtgcaaaatggcggacgcgtaatgatcaagctcgatgtcacggaaggtttcatgccgaattgcgagatcgatttcgtacatgatatcggcggcgtacaacggattattcagaccttctcgaacggtgttcgagtggagttcgacaacgcgacgtgcacagccagtatcagtcgggacaatcgtgccgtgaaaacgttctccgatgtcaaggttcgcgactggggaaacatcgtattcgaggcgcaaagcctcacggattcattaaacaggtaggcttatgatacccaaacaccaaagagaggctatttcccgtcacgaagagcgtctgaatgagctattgcatgcggcggtcgaagaactggaatcgatcagcggatacggtctcggagagtccgactggaacgaagccgacggtacgatcacctttctatttcaagacgtatctctgttgaaacgctttcggcaacgtcgtgtgcaaccgtcaggatctgcccaatccggggatcatgcttatcaatccacacccgaaaggtcatcgtgtactcctccacggcaggaatggaaagttcaaatcggtaacattcaggaggatacgatttatcagttctgtatctcacgtctaaccggcgcaattgaggagacatcgattcacgagtacggaacatcagctgttccgacgggcaaatgaaatggatatatagatcggcaggtaacataatcgctgaaattttgtagatggcaatacaaatatagcgattttcccgcgaacgctgaaggcgttgcccggagcgataccggcgcgggatcgagaacaacgaagcgatggaatatttcggaaacataatagcagtaacgatgcacgagctgacgcagtcggacgatggcgaggcggtaatgagtcgtagtgcttacgatcatctcgtgacgcggggccgggtaaatgttctacgtccgggcaagggactcgggtcgtatgctctgatcgagtaccactcgctacctgaacggttccgactgcgttttgaagcgaaatacggtaatcccgaaaagataatgaaacaggaagatatgccgcttgcagtcgatagcgaagcacaaaagtattatcatgaatatctgttgccgaacggcgaacatttaccggaggataaacaaacagaatacacgttgaatgcgcgggtgctgaatgctcttcgggaaatgcgggggacacaaaaagcgatgcgacgtgcgtgcaataacaatacgccggtcatctggtccaacatcttcgccacggccgaggagttgcgccaagcctacggacacaccctgcccaagagtgaagctcgtctgcgcgacaagctccgccaatatacgaaagagggctatgcctgcctcgtgtctggcaagttctgcaatgcgaacacgctgaaaattaccaaagcggccggacgtcagatcgtcgccctgcgtcgttgtcgcgtcccggtctatacgaccaagcagctcttcgaagaattcaaccgcatcgccgaacgtcgcggttggaaacggctcgcttcgcagtcgtcgctggtgcaatacctcgaacggccggagatcaagccgctgtggtacgacgctgtttatggtgaactggcggccaaacagctctatgcacgccgcaacaagaccgaaatgccgacgatgcgcgattcgctgtggtacggtgacggcacgaagctcaacctcttctacaaggcggtcgagaacggcaaaacggtggtgcgttccgcatcggtgtacgaagtgatcgatgcttacagcgaaaccttgctcggctatgcggtcagcgatacggagaatttcgacgctcagtttcgggcattccgtatggctatcgaaacagccggacacaaaccgtatgaaatcgttaccgacaatcagggcgggcagcggagcaagatcgctcagaagttcttcgcgaatatctgccgcatcaatcgcccgacagcaccatataacgcaccgtcgaaaagtatcgagtcggtgttcggtcgctttcaaaagcaggtactgcatgaggattggcgtttcaccggcgggaacatcacttcgaaagaggcgtggaagatcaaccgggagttcctcgaagcgaacaaggagaaactgttcacctacgaggagatgctggaggcctactccgtcgcccgcagcaaatggaatgcgatgaagcactaccagacggggattgcacacgaagagatgtaccgcacgagcgtcaatcctgcaacggagcgcgtaacggaattggatatgatcgatctgttctggctgacgaccgagcggccgagcatatttacagccgatggtatcacgatccaataccaaaaccgcaagtacacttacgaggtattgacctccgatggtacacccgattacgcatggcgcagtgagaataccggccgagaattcttcgtgcgtttcgatccgaagtccatgaatcgcgcattgctttacgaacagaccccgatggggttacgttacgaaaccgtagcatatccttatctcaccgtccgccgcaatattcaggaacaacaggaaggcgatatggagctgattcgctacaacgatgaagcgaacaaacgtgagcgggtgcgccgtcaaatcgaggcgcacacgttggaactggaacacggcgtcgcaccggaacagcacgggctgcggacaccggcgatcaaaggcatcagcgaaaaagagtacgaacgcctggccgatacggttgtagtcgttccttccgagcagtactccgaaccggtgaccgtcggcgaatataccaaggcggtcagcaatctggattgcgatccgacggcgatattcaatcgaatgtaaatttttgattacaaaccaatatgaaacagttatctctcgaagagaaaaaggatattcaggcccgtttgcaggtctatgtatccaagtatcccagccaaaacaaggcggtgaattcactcggtatcagtgcaggtacgattagtacgattctgaacggtaaattcgacaacatcagcgacgaaatgttcctgcggatccgttcgcaaatttctcctgtgaatccggaggaatggactgtctgcgaaacgacggcttaccgggaattatttcttttgctggaggatgcgcaagcgaatcaaaacgtgtcatgggtggtaggaaatgccggtatcggcaagacgacgaccgcgcacgattatgcggccaagcatgaaaacgtgttcgttatctcgtgttcggaggacatgcgtcgcggggactttattcgtgaaatggcccgcgtcatagggctcaaactcgcccagacgagcctgcgggagaaactccaagccgtaacggatgaattgcgtgtgctcgaccggccgctgctcgtcttcgacgaaggcgacaagttgatggatacggtgttttactacttcatttcgatttacaacgcgctcgaaggacgctgcggaatcatctttctatcgaccgaatacatcaagcggcggatgagtatcggcttggagtacgacaaaaagggttatgacgagatgttttcacgtatcgggcgccggttcatcgacctcactcccgcaaccagccatgaggtgacggccgtatgtctggcaaacgggctgaatgccgaagcagcaatctccagcgtgctggcagatgcccgcacggtcgtatcgaaagctgcaaatccatgggataagaagcaagtgcgggactattacgacatgcgccgtgttcggaaatcggtgcacaaaagtaaaaagctcgctgaaatcaagaaataatcttgttcaaaagcaattcaaatgggccggacactatctgcaaaacaggttctgacgatcaaacgccgcacaattcgtttgggcggcatctgggatgattgcgtgggggaaatcgaccgtacgggtgtggtgttcttctggggtaacagcggcaacggaaagacttcggctgtggtatccttttgcaaggcgctgtgcgctcatggcaaagtactttatctgccgttggaggagggactcggaggaacgacacaggatgctattcggcgttatcgggcagatgaatgcggcagtcgttttcagtacaacgattcgatgagtttcgaagaaatggacgaacgactgtcgaaacctcgatcgtgggatttcgttgtcatcgactctttccaatatacccaaatgagttacaaggaatacatcgcattcaaggagcggcatcgcaacaaattgctgattttcgtcagccatgccgacggcaaacgcccggacggacgtgctgcgatcaaagtgatgtacgacgcttcgctgaaaatctgggtcgaaggttacaaagccttcagtaagggccgttttatcggtccgacaggcgaatgtacgatttacgaagaaggtgcgcgtaaatactggggataaaccttaaatgcaaaacgatatggacatcaagaaaatttacatcagcggaaagatcaccggactgcctgtccaggaggcgatcgccaaatttcgaagtgcggcggagaagatacggcggttcggattcgaaccggtcagcccgttcgacaacggccttccactggaggccgactgggcggagcacataggcaaagatatctcgttgctgcttcgatgtgacgccatctacttgttggacgattacgagaagagcgagggtgcacgcatcgagttgtgcatcgccctccatcgtcgaatgccggtctttatgaacgtacggcccaaactcggatttttcagcgtacaaaccttcgaagattatgacaaagaaaaagcgtagctacttccggttctatgccatcgccaaggcgaaaggtatcgacctcgaccggtacaaggaaactttggtattgcaattcaccgatggtcgtacttcatcgcttcgggagatgatgtcgacggagtacgaagatatgtgcgagtgcttgcagtcgggtaaaatgaggggagaaagtattgcagaccacaaagaacggctacgaaaagcacgttcggcagtgttgaaacgcatgcaacgcctcggtatcgatacgactgattcttcatttaccccggtcaacgaattctgcatggatttacgtatcgcaggcaagccgttcggactattgaccgtagaggaattgcagtcccttattcccaaactggaggcgattctacgcaagcccaaaatccgaaatacacaatgcgccgtttcaattccgcttattattcgatccaaccaattgccgagctaaccatgaaacctgtaattaaaacgatatctgaagtcaaagatgccaaggaacatcttgaagaccaaatatcctgcttgctgatgcagttcgaaaaagataacggaatacatatctccgatttaagcgtctatccgcgtgaaatctacaatgaatacgggaaaataacagatcgccaaatcggaacctcaatcgttgtcaaattatgaccaaccttccttaccgccaggcaatgctgattaaacatacggcatggatgaacactcgcttgctcgcgcggggtcctcggccggaagacgagcggtacgtgccgctcgcggtgcggatgcttacgctggtcggatgcttgaactacgcgatgctcgatcttgaatccgaactcacggcgtccggcttgttccgccatgaaaccaagcgccgttatacgcaggctcagactttggtcttgcaggctcacggcatcgcgtggtcgatgcttcgcaagatcgacgaccgggccgcccggcagtacaacgacaagacggacgaggcgtatcggaccatcagcggctgcatcctgttggaggctcctcaaaggtcttacaacatcgtgttgtcgctgtgtaggatcatcagctctctcaatggtcggatttcgggtcgctacgacttcaatccggccaaacctcttgtacgcatcccggctctgttggagtgtaccgggatcgaagattgcaaaatagacggaatcatcgaattgaatttaacggactaacgaaaatgaaagtaatcgttaccttctcaggaggcaaggacagccttgcagcgctgttgtgggtgcgcgagcatattaccaccaactttaccaccgtgttctgcgatacaggctgggaacacccactgacctatgagtatatcaaccgtatcgccgacaagctgcacctcgatctcgttacgctcaagtcgcacaagtacgacgggatggtcgatcttgcgcggcaaaaaaagcgctgggcctcgacgcgggcgcggttctgtacggtagaactcaaaaccaaaccgacgatcgactatgtgctggacgaagttcaggacaatatgctgatgattcagggcatcagaggcgcggaatctccggcgcgagccaagatgtcggcgcaatgtacgtacttcaaatattatttcgagccctacagttatgacaaaaacggtaagccgaagaagcacagctaccgtggtaaggatgtccgggcatttcgggaaaagttcgccgacgatttgcttcggcccgtgttcgactggtcggcgcagcaggtgatcgattacatcctcgccgcagggttagagccgaatccgctctacacgatggggtataagcgcgtcgggtgctggccgtgtgtgatggcaaaccagcgcgatattctcaatatcgcccaacaatctcccgaacgtatagcggaaatagcaaacttcgaaagagagttgcactcttcttttttcggcccggataagattccctcctacgcaattaccagcggcaataagtatcacaatatccacgatgtcgtgcgctacgtccaatggcagaacgcgacgggcagtttgttcgacgacgatacggcgaccagttgtatgagcttttacggattgtgtgagtaaacaataaaataaaatgaaaaaatacacacaggcagatttcgacgccttcgaggtgatcgacggaatcaaacaatgcccctctggagattacagtgatatacgggtattcggtaagaggtgctccttcggcaataggtgctccttcggcgagcggtgctccttcggtaggggttgctccttcggcgagtgnnnnnnnnnnnnnnnnnnnnnnnnnnnnnnnnnnnnnnnnnnnnnnnnnnnnnnnnnnnnnnnnnnnnnnnnnnnnnnnnnnnnnnnnnnnnnnnnnnnnnnnnnnnnnnnnnnnnnnnnnnnnnnnnnnnnnnnnnnnnnnttcggtaggggttgctccttcggcaataggtgctccttcggtaggggttgctccttcggcgagtgttgctccttcggcgagtggtgctccttcggtaggggttgctccttcggcgagtggtgctccttcggcgagggttgctccttcggtaggggttgctccttcgaagataaaggcgaatatatcggcgattatcctttcctggcttttgtcgggttcggctcccggattggcagcaaggtttactttttcaacctgcaagacggcatttatgtccgttgcggctgctggctgtcggatatagcctggttccgggagagggtgaaggcgaagaataccgatgcgatgtacctggatttgtgcgatctggtcgagaggaagtttaaccgaaaaaactagaaataactatgcgagcgaacgaatatcagacacgcgcgatgagtacgcggctgccgagttgcgagaatgcgacctatatgcttttcggcctggatgcgcccatataggctacacaataaatatctctatggcaagagattaggttagagttcaacagacctatcctcaacgacttagctggaggagaaatccaaaggtgacaaaagcatgtcggtaaagtcattagtcagctaaataccaagctgcgactgcatggcgagaggaaaagacagacacaaggatgaagcctgattggttgaacgatagttctgctgcacacgtaccagccccgacgaaaggtatttgattcacgtcgggctgaagcaccccatgtaaaccgaaattacaatggagcaggagctggcttcagagcaaccacaataagtggaataggaacgtaagtcgcatccgacagtctgccgagccaaacagttattgtgaaagcaaatggggattccctaaatcagaatgccgtaaggctatgggcataggaccctgaatatctgacatgggaacggagcttccgtagtagtccgagcaagggaaagccttgtacatggcgaagggaagcagttagataacttaatacaaataatggaaaatgtgtgagacattatgagaagtcctgagcaagtattaaaagctttaaacaagcatggtaaagtttcggattacaagttcgaaaggctgtaccgtatcttattcaatgaggagatgtttcatgttgcttaccagcgtatttacgccaaaccaggcaatatgacacccggtacggatgggaaaaccatcaatcggatgagtcttcaaagaataaacaaagtcattgcatctttgagagatgagtcttacaagcctaatccggcaaaaaggatatacatacccaagaaaaacggtaagaaaagaccgcttggaattccttcctttgaggacaaacttgtacaggaggtggtgcgcatgattcttgaagccgtctatgaagaggtgtttgcaaacacctcacatggattcagaccaaacagaagctgccataccgcattgacccatatccaaaagacatttacaggtacaaaatggtttgtggaaggagacattaaaggattcttcgacaacatagaccacaatgtattgattgcaactttgcggaaacggattgccgatgatagatttctaaggcttatccgcaagttgttgaatgcgggatatattgaagactggaagtttcataatacaaacaagggaactccacaaggcggtaatatcagtcctatactggcaaacatttatcttgataattttgacaagtatatggaagaatacgccctacgcttcaataagggaaaagaaagacacatcaccaaagaatacaagcaacttagcgataagatgcaacgcatccttaaaagcatcaagaacatacaggatgcagatgtcagattacagcttagggatgagtatgagaaactgagacgtgaaaggcaaaagattgagagcagagacagtatggatgaaacatacagaaggcttcgatacgtaagatacgcagatgatttcctcattggtgttatcggaagcaaggcagagtgcgttaaaatcaagtcggacattaccaagtatatggaagaaaacctcaagctggaactgtcacaggaaaagacattgataacaaacgcacaaaagcccgcgaaatttcttggcttcgatgtttcagtccgtaagtctgatgctatcaagcgggacaagaacaatgtgccagcccgttattacaacggtaagatagtcctaaaggtcgccatagaaacggtgcggaacaaactggaagaatacagcgccatcagatacaaggtagaaaatggccgacaagtttggtttgcaaagttcagaggcaatcttatgaagaagaaaatcgaggacatagtggcggcatataactctgaaatcagagggttctacaactactactgcattgccaacaacgtggcatacgcgctctcaaagtttggatacatcatggagtacagtatgtaccataccattgcaggaaaaaccaatagcactgtaagcaaagtcattgacaaatataaggttgggaatgacattatagtgccatatcaggatgcaaaaggtaaattacggtacaggaaattctataatgagggattcaaacgtaaaccaccaatgtactatacggaggtaaacgacttatcctacacaatcgcaattccacagccgacacttactgagcgattggatgcgagaacatgtgaattatgtggaaaagtcggacctgtagtcatgcgtcatgtcagaaagctaaatcagcttaaaggaaaaactgaatgcgacaggctgatgcttgaaaagcataggaagacattggttgtctgtgaaaagtgttatgccaaaatacacagccatgctaaataaagtcatgttatcaacggagagccgtatgcgtggagacatgcaagtacggtttgggggcaggtacgggaaaacctactgccgaaaggcagtaaggcgttctgtaccgagcctactttatacaatggagagtttgatcctggctcaggatgaacgctagcggcaggcttaacacatgcaagtcgaggggcagcataatggatagcaatatctatggtggcgaccggcgcacgggtgcgtaacgcgtatgcaacctacctttaacagggggataacactgagaaattggtactaataccccataatatcatagaaggcatcttttatggttgaaaattccgatggttagagatgggcatgcgttgtattagctagttggtggggtaacggctcaccaaggcgacgatacatagggggactgagaggttaaccccccacactggtactgagacacggaccagactcctacgggaggcagcagtgaggaatattggtcaatggacgcaagtctgaaccagccatgccgcgtgcaggatgacggctctatgagttgtaaactgcttttgtacgagggtaaacgcagatacgtgtatctgtctgaaagtatcgtacgaataaggatcggctaactccgtgccagcagccgcggtaatacggaggattcaagcgttatccggatttattgggtttaaagggtgcgtaggcggtttgataagttagaggtgaaatttcggggctcaaccctgaacgtgcctctaatactgttgagctagagagtagttgcggtaggcggaatgtatggtgtagcggtgaaatgcttagagatcatacagaacaccgattgcgaaggcagcttaccaaactatatctgacgttgaggcacgaaagcgtggggagcaaacaggattagataccctggtagtccacgcagtaaacgatgataactcgttgtcggcgatacacagtcggtgactaagcgaaagcgataagttatccacctggggagtacgttcgcaagaatgaaactcaaaggaattgacgggggcccgcacaagcggaggaacatgtggtttaattcgatgatacgcgaggaaccttacccgggcttgaaagttagcgacgattcttgaaagaggatttcccttcggggcgcgaaactaggtgctgcatggttgtcgtcagctcgtgccgtgaggtgtcgggttaagtcccataacgagcgcaacccctaccgttagttgccatcaggtgaagctgggcactctggcgggactgccggtgtaagccgagaggaaggtggggatgacgtcaaatcagcacggcccttacgtccggggctacacacgtgttacaatggtaggtacagagggcagctacccagcgatgggatgcgaatctcgaaagcctatctcagttcggattggaggctgaaacccgcctccatgaagttggattcgctagtaatcgcgcatcagccatggcgcggtgaatacgttcccgggccttgtacacaccgcccgtcaagccatgggagccgggggtgcctgaagttcgtgaccgcaaggagcgacctagggcaaaactggtgactggggctaagtcgtaacaaggtagccgtaccggaaggtgcggctggaacacctcctttctggagactttctttttccgctatgcataccctattgtatacgcatagcctatatctcatctccttaatcgtgtcaatgaacgatgattgaatcgcttcaatccgagtggaggataagggagtcgaacccttgaccccctgcttgcaaagcaggtgctctagccaactgagctaatcccccaagcttttgtgtagtcccgtgcggacttgaaccgcagacccctacattatcagtgtagtgctctaaccaactgagctacgggactatatcgcgggaaactccactctataaaaaaatcaccggtattcgagagaaaagaacgcagatcaatctgtcgttaagtaatcatactctccagaaaggaggtgttccagccgcaccttccggtacggctaccttgttacgacttagccccagtcaccagttttgccccgggactttggaagaacccaaaacctggcttacgctgtttatattgttagtagtgagtatgatcttgtttccgcttgcggtcgcatcgctcacctctacggaatcgtttttgacctgcaagattccgacggtacctttggttgcgtgtacttctccgtcggcgtgtaccctgaacacggcttttttccggttcgtatagtcggctcccgaccagaagggcacatcgtcttcctgcaagccgctcactccggccgtcacctcgccttgccggtttctcagtaatatcatactgagaagatagagaccgcctttttcctcggagcctccttctatcgcctgcttgaggtactctgtcgatttgatggattcgtctatcgcatcgtcgatcaagtccgacatgttgctgcttatttcataataatcggagaatacctttctgaactcggtgccggttatctcggatgtcgtactcatatcggccaacaagggtgtgagataatctttgagccgctggaaatagaccgtaaatgaatccgtgggtacatcatacttttcggcattcgccatgatgctccagtattcaccttgaatccgcacccattcattagccacctgctgtttgtcggagggcgtcaggctcgaatccgaggcgatgtagtccacatccatcttcacctgctcgatctgcgcctgcacatcctcctcggcaaaatcaactattggacgatgtgcaaacaactgaaaaaggtaatggcggaatgcggaatagagaagcaaatctcctaccactgcggacgtcatacatttggaacactggctcttagcaaggggatgcccattgaaagcgtgagccgtgttctgggacacacgaacattgtcacgactcaaatctatgcgaaaataaccacacagaaacttgacaatgacctgtcgatgttcggcaacaaactgaacgcatcgttcggaagtgtaaccccataaccaagcatagccatgaagcgaagcatcatcacaacggacggcaatggcaacatcaccttgccgaccgatataggcgcaaccgccatgagcgaatgggaactttgcgacctgttcggagtaaccgccccgacattccgtgcaggactgaaggctctttgcaagagcggagttttaagggaatatgggataaggcgaagcatacgggtatccgataattgcagtatggaggtttacaaccttgaagcgatagtcgccctcgctttccatatcggcacattcagagcggaacaggtacgtaatgccgttcttgaaagactgtacctgcgaaaagagaaaacaagcatcttcttctcgctgaataccaacggtatatccaaatccgaatacttctcgtagctgcatgcctgacattattcactcggtaagtcagtaattcattaagtcagtacgacagaacgacagacgctctgactttttctcccgaaaagcgtaatccgacattcgcttttcgggagtttttccgtttgcacaacccgtttcctgcctcaaaccattgaaagtttttgtttcgggggctatttgtcaccattctgctgtgttttgcataacaacctatccgataattgattatatttttacagctggtaattttcaaacttaaaaccatttgattatgtcagctatcgaacaacaggacagccacagaccgccatcggatggcggcatggcaaaggaagaatttatccgtgtcgggacaatgctctacaagattgtggagcaaccgagactgaacggagggtatgtgaagaaacgcatcgcatggaacaacgagaccctgcgacaggattacggcaaggattacatcggcagcgttcccaagtatgacggcttctgcacagtacccgaacacatcggctaccgttccgtggtcggcaaattccttaacctctacgaaccgatagaccatgtaccccgacaaggggatttcccctctatccgttcattgctgcatcacatcttcggggaacaatacgagttggggatggactatctgcaactgctctacctgcaaccgattcagaagttgcctatcctgctgttggtgtcggaagaacgcaacacgggcaaaagcaccttcctgaactttctgaaagccctttttcagaacaatgtgactttcaacaccaacgaggatttccgcagccagttcaattccgattgggcgggtaagctccttatcgtggtggatgaggtgttgctcaaccgcagggaggacagcgaacggttgaaaaacctcagcactaccttatcctacaaggtggaagccaaaggcaaagaccgtgacgagattgcattcttcgccaaattcgtgctgtgctccaacaacgagtatctgcccgtaatcatagatgcaggggaaacacgctattgggtgcgcaagatagaccgcttgcagtccgatgacaccgacttcctgcaaaaactgaaagcggagatacccgcctttctccatttcctgcaatacagacagctatccaccgataaggaaagccggatgtggttcaaccccacattgctgcatacagaagccttgcagaagattatccgcagcaaccgcaaccgattggagatagagatgcacgaacttgtccttgacatcatggacagtgtcggcacggatacattctctttctgttacagcgacattcttcttttgctggtacactcacaggtaaaggtggagaaacaccaagtccgaaaagtgttgcaggaatgttggaaactgacccctgcgccaaacggactgacttataccacctaccagttcaactgcaatcgggagtgtcggtatgagccgataaggagagtgggacgcttctacaccgtcacaagggagcaacttgaatccctgtaatattatcatttttctgttgaattgttgaatatgggtataaatacactgacaataaacgatatacattctcaacaaaatctcaacaagccaaaagagaagttgagagaccaccgacacccgtttgttgatttttcttttggcgagtggtttgttgagaagatgttgagaggttacgaggctgtatataaatatattacattgacaattcatcaaatcaacaaattttcatcaacttcaaaaccatatgtaatatgacaatccaagatgtaaagcaaatcaaactggcagactatctgcaaagtctgggctatacgcctgtaaagcaacaaggcaggaacctgtggtacaaatcaccgttacgggaagaaacggacgcatcgttcaaggtaaacaccgagcttgaaaaatggtacgacttcggcatcggcaaaggcggtaatatcattgcattggcagcggaactctaccgttcggaagatgtagcctatctgctgaaacgcatagaggagcagacagcatacatccgccctgcatcgttctcttttggcagacagcattccgacaatcagccttatcagggattaagggttggtgagttgtcctctcctgctcttatagcctatctgcaagaaaggggaataaacatcggacttgccaaaagagaatgcagggagcttcggtttatgaatgccgacaaaccctattttgccatcggctttccgaacatggcaggaggatatgaagtgcgcaacagatacttcaagggatgtgtcgccccgaaagacatcactcatatccgacagcaggacggacaacgatgtatgtgttacctgttcgaggggttcatggattacctctcattccttaccatccgagtaagaaacaatccgcaacacccgcgattggacacacaggactatgtcatactgaactccgtttccaatcttgcgaaagcggaaagcttattggaaacctacacccaaatcggctgtttccttgacaacgacacggctggacggagcacctgcaagaagctgaaagagaagttcggggaacggatgcttgacaagtcaatgtactatcgtgattataaggacttgaacgactacctgtgcggtaagcccttgtcccaatcggcagagccgataaaggagaagaagcaagtccaatccgcaaggcggatgatgcagccaccgaaaaagaaagggggatttcatctgtaatatgcacgtccgctctcccaaggtatttagacagaaataccatagctcaatagggcgttttcttcacgcattactccgtaacgctaaaaacaccctatcgagccaaagggaaatccctttggaaaccctgtgcaaacgagagcagaagccaaactcgtttggattatgccgagtgctgcaatggttcatttgcataataaaccctgtgagccgatgccacaggcagagagaagaaacataacgataaccgcaaaaacagtaatgatatgggatatttttcattggacattaagaaggcaaagggtacatcggacaccacgcagtccgaccatatagagagaaagataatacctaaaaacgcagacccgacaagaacacatctgaacagggtgcttgtcgaataccctgatggcgttcacggcagggatgaagcgattgcccacaggctgaacacggcaggcatcagacggaaaatcacgcacgaccaagtccgcgttgtccgggtggttttgtcgggtacgcacgaggacatgatgaacatacaggaaaaaggaaagctcgacgaatggtgcaacgacagcatccaatggctgcaagccacattcggcaaagacaatgtggttgccgcccatctgcacatggacgagaagactccgcacatccacgcagccgttgttcctatcgtgacgggtgaaaggcgcaaagccaagaaagaacagacggacggtaagcgcaagtaccgcaagaaaacaaattccgtccgtttgtgtgccgatgacctgttcaaccgccagaccctgattgcctaccacgacaattacgcaagggtgatgacgaaatacggattgcaacgtggggtacggggctcggaagcacggcacactaccaccatgcagtattatcgggacttgaaaaagaaaaatgaaacccttgaaaccgaaaccagactgttacaggagaagaaagccgaggcgcaggaggaactgaaacaggtaaaagcggaaatccgcaccgacaagctcaaaagcgcagccaccgatacggcaaccgcccttgcaagcagtgtgggttctcttttcggaagtggaagaatgaaatcgttggaacgcaggaacgaggacttgcaagaccgcatccttgaacttgaagacgaagcccgacaacgggaacggcaacaagccgaacagatacaggagataagaaacgcttacgagcaacagcaccgcaagctgtcggagtttacggattttgtcagacgctatttcccgtatgtggagaagctgatgcctgtaataaacttcctgcgtgaccgattggggttcaatgacggaataatcagaagactgtgcgagttcaaggaggtcgggataaaaggcgaactctattcttccgaatttaaccgaagttttgatacccgacactccgtctgttccatcagacaggacgaaaacggtagattcgatttcaagatagacggggtttcacacgtgaactggttcagaaagaaaatgaatgagtttagagaagctatcggaataccgaaaccaagacagaataggagtatgaaactgtaaatcaaaaaaatccgtgatgtttgaatggcagatcacggatttttcttacctttgtatcggattgaggtaactctttccaaaacatattagataagaaagaagcgttatgcgcatcaagtatttggaaacgtaggaaattttcaaattgcatactcagatggcatagtggttctcacgctatagcgtgggctgctattactacatctgtatgcaaggtttcctacgacctccaaataaagacgtggctgtgcagttcacgctttatatatttataagtaagaattatggattcagaaaaaaaatggggttgtattggatatgccctactagcacttataacttggggacttactcaaggttttaaagtcgtatgcataattataggaattttaatagccattcttatagcttttatatttatatcaaatttatcaaccaagcgtttaataaagaaatttaagcatcaaaaagatatatatcctaatgcatactctttctttcgaaaagaattacgaatattccagtctgaaaacaatcttacaaaacaagatataaataaattcctctcattccctaaagttgaatgggaaaagagagaaaagctcgaattggaaagaatacaacgagaaaagcaggtatcaactgaatataatatgattaaagccaactattcagatggacttacttgttggcaaaaagaacatccttctgcaaacaaatcaataataataagtaatattacggaaataatagatttcgataggcggcaaaaagagtttttaagtaccgaagaatgggaaaaggcacaaatagcttttagtaagttatgtcgtagcaaaaaatctacaacgccacattctggttgctatttttataacatgaattttcaaaaaaccgactataaaggaaatatcatacaaggagaatatcgcatatggcaattctttttttcaagtttttgcactgcaaccgatttagattacactcattttaaacagacgcaagagaataacattaatatagataaatataaggagggaaaaataaataccccttcttatatcaacatagagattagtaactttataaaatcattgggtgtccctgtgcaagtaatcgcatatggggctgaattcgatgaaaatcttcaagttcagtttttaactcttgatttggctgtacttggatttcaatcatgtgctctccatcatatagatgaattatcttcaaactatgttgttattattgatggagtaacaacacaagacttgtttgtaaaaagatgcgaatctgtaatacagaaatttaagcatcaaaagccctgtattgtttatatttctttaatgaaagagttttctcgggaagagatgcaaaaactcattgataaaaagaacatagaagtgcagcaacaaaaacaaataaaagatgaaatcaattctatttctaatgcattaaagtctgctgatattgagacggcaaaagaaaaagtcaagaaggttaaagattttgctttgtctaaaagcgtagataaagaattgatagatgtcatttgcaaaacagagaaaaaaatagaaagtgattatgctgttggagtggttgatgattttgatgttcaatatgttgattatttgatgccatcagttgtccaagataagagtaactggaaatatccagtaactaaatatcctgaagatggctgtattgtttttccatacagaagaaaagctatagcaagaagagggttcagtgaagctaaattccaaaattatctacaagatactttcaggggatgtgatttacttatactcggtgattgcaatatacttcctgtagaagataacaggccttttgaaccagatatagcgattatatgcaaaaagcacccatctataagaatagacattgaaatagacgaaccatatgctgcatttacacgaaaacctatacattatataggatgtggagatgattttcgtgatgcacttctgaataatatcggatggattgttattcgttttactgaatatcaagttttttccaatcctaagggatgtgcggcttttatagcacaagttcttcattatatacaaccctctatggttttaccaatcgattttctctcatgttctactccaaaggaaattgaacgatggacagaaatcgaagccaaagttatggcaagtgaaaatactcgcgagaaatacttgaaccatgaatttggtattgttgacaatgagaaacttgaaattgcagacataacacaaacggaaaaagaaagggtttgtgccaagagaatgaaaccattggtgttttcttcaaatagaaaagtaaactataaaataggagaacctgttttttgcgaaaaagacgttcatattcaattctatccacaagaacatatttatctatatgatggacaggaacaatttattcctgtcagcagtgtgatatcttgtttctttaagccatttgattcatactattggtcagaatataaagctaatcaacgaaatatatcacaaggacagattcttgaagaatgggattcaaaaggtgcgtgttcacgtgatgtcggaacttttatgcaccaacaaatagaaaactattataagggacttccatatcaacaagaattctctttcaaatatgacggaaaatatgttcacatagaagaacaaatttctcttgaacttgaatatatgcaattcatagagtttctcgaaaaccacaaatttaaaccgtttagaacagaatgggctatatatgatgacgaactaaaaattgctggtacaatagatatgatacataaacgtggagatgtttttgacatatatgattggaaacgtagtcatcgcattgtcgatttttggggtaaaccgattgcggtaaacaactatggcgagaaagggttaggtgaactcaatcaaattgaggatacgccatattggcattattgtattcaacagaacctatatcgctatattctcgaaagaaattatgacataattatcgaaaagatgtatcttgtggttttctgtgatgatacaaatgaatacagaaaattggaagtgccacgtatggatgaagtcataatttctatagtaaaatcctgtaagaacgggactgttaagaagcggttgataacattacagggagaaaatctatcataacattgataattaagttttttgtatggaagataattattacatcaaaactctccttgagaaaattgagtctgctgacccaaaatcgttcagtcaatttgcacatgaacatcccatttgttttcaagagaaaaagggcaattggctctttcctatgatgtttgatttttatgtgaataaaatacacaatgagtatatcatatctttacttaaagagttgggactgtatctacacaataaatgtaagaattatgaaatgtctgaaattactatgattgatagaagtttgtgcatagatgattcgtttgtggataattatgtcctcaaagttcaaaatgcacaaaatgacaagcctaaattcaaagatttaaattctccttggcgtacaaggggaatttcattagcattatatgaaattcctacttttgtattaaattctatcatatttgaatttaaagatacagagcatccatatatacttgctgatatagcaggtatgtatatgtatgggcaaaagttcgaagaagggctaaattatctttatcgaagtataaatcaacttgcaatgttcccgaatcgatattggaatagtgattatggattagctggggcagcaaatacttttagattattactattgatgtgccctaaaaaccatatggaactatatagaaagatttattcatatgattatctatatttgacaaaattagcctgtacaacaaatgatgaaatctttcaacaggaagcttatgtaaatagggcatctattgctatggattctatggcaaggtatataattccaataaatatcaatcctgacttgttgtacatttctgatatgtactatgcgcattattgtaatgaattagcaacccaaatatcaatatcttcgggatggaagtataatatgaaatcacttacctattatcaacacgcatctattaaacctaatgatacgggaggatatgttgatattgaagaaaaaacatataatgaaattgtatcagcaaaacacgagcaggcaaaatcaatagctttgttgttttatacaggaatctgtgcggaggatggcaaattaacaagtcgtaatattgaatctttatttaagatattacaatatgaatgtaggtacaattacaaagaaacaagaaaaagagtgttaaactttaaatcatacaaataacatggatttttttgaatttttattcggtaaaaaggaagataaaaatgtgagttcacaatcatcttcaagtgtaaacaattgtaagtctgaatctacgataaagtcagttctgcaatcagaagctccatctatggaccctatagaacaatatgtaaaggaaagtgtaacagacctgaaaaaacacatgcctcttaatacaaaagaccttgaagcagaagctatttatcttgcagcatatctttatctgaaaggttcttatcagattgactttgaattagattacttctcggaaggtcttattgataagatcccatcaagaaacttcaatgttgctgataaggtgttttcatacatggtaaaatatggagaaggacactatggagtagaagaacgggattatggtattaatggttataaaatgaatattcaaatgtgttctgattatggtagttatgtgaagagctattttataagagcacataaaatcggttcagggcaagattataatcactttagttcaccaagaaactgtttatggagaaatggagaaaaaactatagatagtccaacccaacgagacatctactacaaatttagcaagggcacgtttgaatttatgataccaccatacaatcctcttgttgtaggacgtgtaacaaaacaagatgaatcaactctacgttgtgaatcaaatgatggaagaagaacatttgttttccactttaatggcgcattaaagccaagttgtttggattatatagagatgtatcgaaatgataagggagatatggtttcttatcacaaagaatagcctttaaaacattttttctatatcaaaagaaattagacaaatattcaagtgctgtactatctaagggacataataaatagtacagtgctttttatatataagtaaaattcgtatctttgcaacaaaataagagttccttgtaagcaattcaaggtagaacgcagcagattgcacagttgccaagtcattacctcaaaaatgggtaattctcccaaagtcctttgtataaggcactaacgaaagttttccagaattacggaaaataattgccatttttcaggaaaaatattaattatatgtcggttttgtgatccggacaaatggtaattcttgtatttataagtgttttttcaaaaaaatacaccattattcgacgttcgtaatatcaaatccacggcttccaatgctttgttgacggtgcgcttcagatttcgatcggtatgcggattggcataaattcgtcgagaatctgatttcttccgatggagggggactccttgccgtatatgtcggtgatgaagaattttcaacgacatgtactccgggtacggaatacgtgatttatggatttgcgtatgatgatctggaggttcggtcggatatatcgtttttccgtgcttcttcgttgtccttctcgtccgtgtcgtcgccttcccagtcgaacggcgggaaatcgcgtcgttcacccagcgagaagcgggtgtaggtgatcggcagcttccgttcgaggaacatctgttcgtaggcggtcttgaccgagagtatttcgtccgcgaaccctgagccgtagatgtcattgttggccacgtcgcagggcagaccgaaccgttcgatcacggcttgcgtgtaggcgtagaggtgttgcgagtcggtcttgaggttgattcgtccgccgggaaccagtatctgtgcgtactggcccaggaagaggggcgaggtgagccgtttcttggcccggcgcgatttgagctgcggatcggggaaggtgatccagatctcatcgacctctccttctgcgaagaaggaggcgatcatttcgatgcgggtacgcagaaaaccgacgttgcgcatttgccgttccgtggcggttttggccccgcgccacatgcgggcgcccttgatgtcgataccgatgaagttgcggccggggtcgcgctccgcgagtgcgacggtgtattcgcccttgccgcagcccagttcgagtacgatcggacggtcgttatggaaaaaatcgctgtgccaatgtcctttgagcggatggtcgcggcggaaggcctcctcgaaggcgggttgcacgaaacattcgaacgtgaggttctccgcaaagcgtctgagtttgtctttgcccatctgtttttattcgcttttttgctggttgatgccgatggcttccacgccccggaccggcgtcgccggggtgaaaaccatcctgtaaatgccgctgtcgggaaaaattacgtgccggcgatagggaaccgacgcttcctccgcgagggctgccgggtgcctgcggggaggaaggcccagtgtgtaggattcctcgaaaaccagggagtcgggcgaaatggtccgtatcgtcagccgcagcgtgtcgccccgaaaggagtcgttgtagcgcacgacgatgtataggtcgcgcggggtcacggtatccgcgttcggaatttcgatttcggcactttcgctccacgtgccgcccccggtatcggttacgaccgtctgatgcggcgaaaggcagctcgtaacgagcattccggcgatcgctatgatactccgcaggtacattacgagtcgttattgctcttttttcggcggttcgggttgtgctgtctctccgtttccgccttcctgacggttgccttcacgacggttgcgtcctccgcgtccccgaggacggcggcgggcaccgttctgtccctcttcgcccggagattgggagtgtgtcggagtcggatcggtttcggagccgttttgtcccggacggttttcggaacgagaacgctccgaacgacgttccccgcgctgttcgctgcgagagccctgaccgttgccgcgttcaccgttctgttcgccggaggtgttcccgcgttcggtgcgctgttcgtttttctgggtactttgtccgtttcgcggcccgttccggtcgctgttgcgtgggttgcgcgattcgcggccttcgccttgtccgtttctattattccgttcacggcggtcgcgtttttcgcggcgttcactccggttggctgcattttcctgtttttcgtccttgcgggattccgaaacggcggccgcttctgcggcgcttccgctgcgggcaccgttgttccggttctcgcgttcctctgcccggtcgctgcggcgtcggttgcggcccttgcgtttggagccgttgccgtcgaagcgtgtgatgctgtcctcctccgagcgataggtcggttcttcgaacttctcccgttgtggttgctccgccgacagctgatcgaccttcttgccggcgcggttcagcgctatgatctccttgacgcgggcgacgggaagcgtcaccacgttggtcatcgtatccttgctgctgctgaaggacatggtaccggccaggatgtcggttttgaccaggtaatattcgccgtcgagagcctggagcggttcccgcagacgggggaactccttgcgggcgtccacgtaggtgtcgtattcgtaggcgaggcagcacttgagtttcgagcactgtccggccagtttttgggggttgagggagatctcctgcatacgggccgagttggtcgtcacactcgagaaattcgagatccacgatgcgcaacacagttcgcggccgcaggctccgatgccgccgatgcgtcccgcttcctggcgggcgccgatctgtttcatttcgatgcggatgtgaaaccgttcggcgaagaccttgattagctcgcggaaatccacgcgctcgtcggcgatgtagtagaagatcgccttgatcttgtcgccttggtactccacgtcgccgattttcatattgagtcccatttcggcggcgatctggcgtgcggtgatcatcgtttcgtgctccagagcgatggcctcctgccagcgttcgatgtcgtagggtttggccttgcggtaaatcttcttgaattcgccgttgtaggggttgaaacccacgcggcgcatttggcgggctaccatgtcgcccgtcagggagacgatgccgatgtcgtgtcccggcgaagcttccacagcgacgatgtcgccccgttccagcggcagattattgacgttttggtagtaggagcgccgggtgttcttgaagcgcacttcgaaaatatcggtcggcgtgtgttgcgggtattgctccagccaggctgtttcgtgcagtttgtagcaaccctcgcaaggcttggctgcgaccccttcgggggcgtagtagaacgtgcagccgcgaccgatttcgggcttgggcgctttcgtatatggtttggtgttatccattggagtcataaatttcggtaaagatagtgaaatccgggagcaatgccaaatttattcggctgagactccggcatattcccgccgggcggatgtgcgtcgctgccgggaagcggagatcccggattatcggatgccggccttccagcgccggatatcgcggcggtagcggacgatcagcagtacggcggccgtcgtaagaccgacggtgaagcccagaatcagcccctgtgcgcccattcccaatgtaaagcccaacaggtaacccaccggcaggttgaagacgatgtacgagaggaaagcgatcggcatgatgatcttcacgtcctgaataccccgcagaatgcctaccgaaacgttctggatgccgtccgccaactggtaaacggcgatcagcaggatcagcttcgaggccaggtcgatcacttcggcgttggtggtgaagaaagtcgggatgacgttgcagagcgagatgaacgtgatggcggcgaagaggttccaggcgatgaccaggtggtaggaggcctttgccgccagagtcagctccttcaagctgcgggcgccgtagcagtgggagatgcggatggtcgtggcggcaccgatcgaagtcacgatcatgaaggcgcagttgcccaaggtcatggcgatctggttggcgctgatggccgttttgctcagccagcccatcatgatactggtgccgacgaaggccgaggcttcgagaaacatctgcagggagatcggaaggcccatacgcagcaatgtgcggatcgttttgaccgaatagttgcggggcgagaatccctgaagataggcgcggtatttctgttttttgtagaaatagccgataatcatgatcggcatggcgatgcgcgatccgagggtgccgagccccgcacctgtggcgcccagttcttcgaatccgaggtggccgtagatgaaaatccagttcaagccgacgttcatcaggttgcagagaatcaccacgaccatttcgacccgggtgtttccgacgccttcgaggaattgcttgaaggtgaagaagagcatgatgaacggcatgctgtaagccagcaacttgtaatacggtatggccatatcgaccacttcgacgggctgtcccatgtggtacatcaaagggatgacggccagttggagcccgcagaccagaaatcccaacagagtatagaacatcaggccgttttgcaggtattgcgacgatttgcaacggtcgccctgggcgtagagttcgccgatcaggggcgtgaggcccagtgcgatgccgacgccggcgatgaagaggatgaagaagaccgagccgccgaacgaagtggcggccagcggcgtggggtcgtcgcctccgtaacggccgaccatgacgttgtcggcgacctgtacgaggatctgccccaactgggtcatcacgacgggcagggccagtttcagattggctttgtattgtcgtttgtaggttgaaaaacggtacatatatttcttgaatcagacgacaaaggtacgaaaataatcgattatccctctttcgcatccgtttcgaagggggaacggagtctgatgtccggacctttcgaccgggtgtcggggccgattttgcaggcagatgtcgaaagcatgcgggacggacatatatggagctgttcccggtttcgatgcaaatgcctcgttgccgggaggactgttcggggttattccgtatgtcgggccggggttgttgtcggttctggaaaaccgcttagtcgaaggagtgggtgaggcgtgaaaatcccggccgatacttgcttcggccgggattcgaaaaccgtccgccactggttctgatttatgttaggcgacccggagaatcacctccttttcgccgtcgggttccacgatcacccgctccccgctgtgcagtttgccgtcgataatcagtcccgagagaggttcctcgatgcgttcgagcagcgtgcggcgcagggcgcggacgccgtatttgcgctggtagccgatggcggcaagggtccgcttcgcctcgtcggtgatttcgaccttgtagccgagtcggtcggtacgggagagcagccccttgagttccaggtcgatgatccgctccacgtccgagaggtcgagcgtgcggaagatgacgatgtcgtcgatgcggttcaggaactccggtgcgaaggtttcttccagcgcccggcggtattccgactgcggggctttctgctgggtgtccgatttcgaacaggtgctgtacccgacctgcgtggagcgtattgccgcggcccgcgatccgacgttggaggtgagaatgattaccgtatttcggaaatcgaccttgcgccccgaaccgtcggtgaggtgtccctcgtcgaagatctgcaacagggtgttgaagacttcggggtgggctttctcgatttcgtcgaacaggacgaccgaatagggatggcggcgtaccgcttcggtgagctgtccgccttcgccgtagccgacatatcccggcggggagccgatcaaccgtgcgacgttgtgtttttcgctgtattcgctcatgtcgatacggatgagtcccttgttctcgtcgaagagccatttggagagctctttcgccagcagggttttgcccacgcccgtcggtccgacgaacatgaagacgccgatcggacgcccttcgtccttgagtcccgcccgggagcgttggatcgaccgcgaaatcttttcgacggcttcgcattggccgatgacgcgggccgaaagatagtccgcaaggccgcgcagacgttcgctttcgctgcccgagagccgttcggctgggattcccgtcatggaggtaataacctgctcgatatgctcggcccggatttcgggcgggccgggatcggacggaagagtccatacggcgccaccgacagtcgtcgtgtccgctgccgccgttttgcgggagcggtttttgggcgttttggctcctgctgcggcgccgaccggttcgcgggatgcggtttttcgggacggtttttcggttttgcctttgtcctgcaggtgaatacgtgccccggcttcgtccagcacgtcgatcgccttgtccggaaagttgcggtcggtaatgtagcgcccggtcagggcgacgcaggcccgcaatgcttcgtccgagtagcgcactccgtggtgccgttcgtaatggggtgcgatgttgtgcaggatttgcagggtttcctcttccgaagcgggttcgacgaggattttctgaaagcggcgttccagcgcgggatcgctctcgatatcttcgcgatattcgtccagcgtcgtggctccgatgacctgcaattcgccccgcgccagggcgggtttgagaatgttggccgtgtcgaggcttccctgggtcgaacctgcgcccgcgatggtgtgtatttcgtcgatgaagaggatcgagtcctgcttcctgcgcaattcttcgagaagtcgctgcatccgttcttcgaactcacctctgtatttggtcccggccaggagcgacgatacgtcgagcgaatagagccgtttgccgcggatggtggcgggaacttcgtccgctgccatccgcagggccagcccttcgacgatggcgctcttgcccacgccggcttcgccgatcaggatcgggttgttcttcttgcggcgcgagaggatctgcacgatgcgttccatctcccgctcgcgtcctacgacgggatcgatgcggcctctgcgagcttcgtacgtaaggtcggtgccgaatttgtccaacaaggcaggttccgcaggaggagtgtcccggacaggttcgcgcaggccgatgaaccgtagttcgggtgtcggccgaaaattggtatccggaggcgtcgtttgatcggcctccagggtcatcttttgcagttcggtcgctatcgcctgtgcatcgaaatggtacatggccagcacctgcgaagtgatcgtgtgcgggtcgctcacgatgtgcagcagtgcgtgtgccgtcgaaacatggtgcatcggggcgaacaatcgttgtaattctctggtgtataaagggaaaaattcttcgggattctgcctcgatgaatcgggtgccgataccgaccgaatctcgctttcgatgcgaaggcatatttggtgaatctcccagtccttgaggcgggaggtgagtatctgatgcgctaaggacccttcttcccgcagaatctcaagggtgagaaaatccttgagtgagtgggtaatagcgcgtttcgaggtttcgaatgccgtacgggcgatgatggcctcgagcgtttttgagattttagcttgcatcttggattccttttttagttttccgtgttcggaaaagcgaacgcggtcgctctctcctcgcttgtcgaaaatgtacgttttgtcctgttgaaattacagacttataacgaagaaatcccaggtaatattatgttaaataaaaatattgcatattgaacgatttcgtccctttatcaagcgccgggacgaggccattcgccgatttccatgtcgcggatgtcggtgccgtcgatggtgaagcgcagggcgctgcgcaccttgtggaaaccgtagcagccggcagcgccggggttgaggtgaagcaggtcgtaaacggggtcgtagatgaccttgagaatgtgggagtgccccgcgatgaagattttcgggcgcagcgattggatccgcgctacggcctgcggggtgtagtggcggggatagccgccgatgtgggtcatcaggacgctcaccccttcgcactcgaaggagaggaattcgcggtaggtgcgtcgcatgatacctccgtcgatattgccatagacggcccgcaggggtttgaacgccgcgatctggtcggcgacctccggagagccgatgtccccggcgtgccagatttcgtccacgtccttgaggaatgttttgagcgtttggtcgaacgtgccgtgggtgtcggatatgagtcctatgcgtttcatgctattttgttgttctctgtattcttcggtaaactgccggcgaagtttgtgtttcattcggatttctgcctgccgaatttgcgccgcccgcccagcaggtagagcgtgccgacgacggcggcggcaagggttgccgtactgtccgcaagaggagcgcagcccgtcacggccatttccgcaacgcccgcgacggcccgcagcaggaagagggtggcaatggtgtaaatacctgtttcgagcagtggcagccgtcggattacaccggcgcccgaaagtccgtagaggccgaatacggcgaagatgaacgcaatggcgacggtcagcagataaggaatggccgccccgtagcggagggccagcgtttccatgattccgtcgatgcgatagatcgacagtacgggatagagccaaggcaggcaggcgaggtgtcccgccgcgatcaggaaattcaatatagcgcctgttttcaacatgtcggcagtctttatgtttccggggatagattccgtcccggtttcgggatttatgattcggggattgcccgttgtgctcttttgccgtttgtcggcatattttggtcgcttgtgtcgctgccgttcgccggggtgaaatacgggatgtcgtccgatcgtattttcagggctgtccggcagtcggcttcaggaatgccggaaggcattgtgctctccggctgttatttatatttgtccttccacagctcccggatgcacgcggcgatcttcgcttcggcggcgttgcgggtgttcggctcgtagaatttcttgcctttgagcgtttcgggcatgaactccagctcggcgaatccgccgtagtcgtgggcgtatttatagcctttgccgtaccccgcctgatccatcagcttggtcggggcgttgcgcaggtgcaggggtacgggccggttggtcgtatcgtgttcgacgaaggagagcgcctggttgatggccatgtaggccgaattgctcttgggcgaggtggccaggtagatcgtggtttcggccagcgtgatgcgggcttcgggcatgccgatcttgtgcaccgtgtcgaaacaggcgttggccagcagcagggcgttgggattggccaggccgatgtcttccgaggccaggatcaccagccggcgggcgatgaagcgcggctcttcgcctccggccagcatgcgggccaggtagtagatcgctgcgttgggatcgctgccccgcaccgatttgatgaaggccgagatcacgtcgtagtgctgttcgccgttcttgtcgtagagggcgatgttctgctgcaaacagtcggtgacgtattggttggtgatcgttactttgccgtctgcggcgcccgtgatgatgtccagaatgttgagcagcttgcgggcgtcgccgcccgaaaagcggaacagcgcttcggtttcctgtacctcgatctccctggttttgagctccggatcggtggcgagggcccggtcgaggagggtttgtagttccccgtcggtcatcggctggaggatatagacctggcagcggctcaacagcggtgagatcacctcgaacgagggattttcggtcgtagctccgatcagcgttaccacgccctgttcgacagcacccagcagcgagtcctgctgcgacttgttgaagcggtggatttcgtcgatgaacaggatcggcggtttggagtcgaagaatttctgcttgcgggccgattccaacacttcgcgcacctccttgacgcccgacgtgacggccgacagggtgtagaacgggcgtttgagagccgtggcaacgatcttggccagcgtagtctttcccacgcccggcggaccccagaggatgaacgaggggacgttgcccgtttcgaggaacttgcggaatacgccgttctgcccgaccagatgggcctgtccgatatattcatcgagcgtatggggacgcagtcgttcggcgaggggaatggacatggaaagcatttttttgtcgctcaaatgtactgaaaatttttgttttcggcaacggccggactgaatgcggtccgaaagagcggatgcgtagaaccgctgccgtccggttcggggattcgcagcggggagatcgtgtcctggccggatttcgtttctacgtcgtgcttcacgcttgttctgcggtcgcagttcccgacgcgatgcgctattgtatatttcgaaaaggatcgctatatttgccgtacatattgatacacacggaaaagtgtaagtctgttcccgaatcgtgaacgtaggaaattcattttggcggagaataggcagacatcttctcgcgtcgtatccgtattctgcggatataggcgtggggctgtcgcttatttcacgccaaaaggtactcctacgacctgcgattctgaaatgggcttcggtgccacgcttttctttttattaccagtcgtcagggtacggacgatacaatcttaaattttatggataatattacgaagcagaatggaaatgaagtcggcagacatcaggtcgaagggcagacgatcattatcaatcagcaggagcggagaagcacgaacggactgggaaccgccggttttattctggccttgttgggtttgattttcagctgggttccggggctcggctgggtattgtgggccttgggtttgattttttcattcgtgggaattttcagaactccccgcggcttggcgatcgccgggcttgtcatatcgtgtatcgcgttgatcgttttgattatcttggtgagtgcgatcgcttccctggtgtaatcatttcagttggtatgaagaaagagtatcctgtgcagaaggatactctttcttgtattgcgatgcttgaaactttaatatctccggtttttcaattccggtacagtttgtcgaacggcgaaagatcgctctaatccggtgcatcgagcattatgttgcagccatcgttgttcttcggagaagccttgaattccgtgtaactgtctggctaaaggagctatttgcgtagtttgtcatgccgttcgcgctccttgcggcgcatcgagcgatagctgtttcccatcagcgccagaagcagcagcaccgtgacccaggcgcggactttgtcgcctgtggccgcagtaccgcatgtatagacggtgatgagcattgccaaactgcatgctaaaaggatcatgcagaacctgagcagccgccgaagcgatcttacagaggccatacgagatcttgttttggtttattcttccggttttaccaattgaatgtgtaactcgtcgagttgcgcctggtcgatatagcccggtgcgtcgagcatcatgtcgcggccgttgttgtttttcgggaaggcgatgtagtcgcggatcgactccgaaccgccgaagagcgagcagagacggtcgaacccgaaggccagaccgccgtgagggggtgcgccgtacttgaaggcgttcatcaggaagccgaaacgctcctgcgcttgttccgccgtgaagcccagcaactcgaacatcttggcctgcagtttcgaatcgtggatacggatcgagccgccgccgatctcggtgccgttgcagacgaagtcgtaggcgttggcccgcacgcgaccggggtcgctgtccaggtattgtacgtcttcgagcttgggcgaggtgaacggatggtgtacggcgtagtagcgctgggtttcgtcgtcccactcgaacagcgggaagtcgatgacccacagcggagcgaatttcttcgggtcgcgcaggcccagttgctgagcgacctccagacgcagggcgcagagctgcgtgagggtcttgaatttcttgccgcagaggatcagcaccaggtcgccggcttttgcgcccgcgcgttcggccatcgcccgcacctgctcgggcgagtagaacttatcgacggacgacttgacgttgccgtccgcttcgacgcggatccagacgagtcccttggcaccgatctgctggcgtttgacgaactccgtgagggcgtcgatctgtttgcgggtgtagccggcgcagcccgtcgcggcgaagccggtgacgtactccgcgtcgtcgaaaaccgcgaagccgtgaccttgggccaggtccgtcaggtcggcgaactccatgccgaagcgcaggtcgggtttgtccgagccgtatttctccatcgcttcgatccagggcatgcggcgcagcggctccgtaagttcgatgcccatcacttcgcggaacatgtgcttggcccagcgctcgaagatttcgagcacgtcctcctgctcgacgaacgacatttcgcagtcgatctgcgtgaattcgggctggcggtcggcccgcaggtcttcgtcgcggaaacagcgcacgatctggaagtatttgtcgtagccggcgaccatcagcagctgcttgagggtctggggcgactggggcagggcgtagaattggttggggctcatgcggctcggcacgacgaagtcccgggcgccttcgggcgtggaattgaccaggtagggggtttcgatctccaggaaaccttcgtcgctcaggaagcggcggatctcctgggccatcttgtgacgcaggatcatgttgcgctgcaggggaggacggcgcaggtcgaggtagcggtatttcatacgcaggtcgtcgccgccgtccgagttctcctcgatggtgaatgggggcacttcggcctcgtgcagcaccacgagcttcgaggcgacgacttcgatgtcgcccgtaggcatctttgggttcttggacgaacgctccaccacgcggccttcgacctgaaggacgtattcgcggcccagtccgtcggccacggtcttgacatcggccggagagtgctcttcgacgacgatctgggtgatgccgtaacggtcccgcaggtcgatgaaggtcatcgcgccgaggttgcggactttctgtacccagccggccagcgtgaccgtttcgtttacatttgcggcacgcaactggccgcaggtatgggttctgtacatggtcgtatctgtatttttcgttattgtcgttttgcgattcacaaaggtagtgaaaacggggtggaatccaacaatcccgcctggcgggtttcaccgggtgtcatctactgtctgcaaaggtaggaaaatgagtgcagaatggaacaaactcgtccgtttttttataagggcctcatctcttttgtaaaaaaggtcggaaacggaaacgaaattccggctgtaaaacgggataaaaaacgcagggacgccgaattctccgctaaattattaattttgccgaaaaaccgaaacgatggaacagcagcaacccgatgaaaaattcatgcgcctggcactaaacgaggcggaaaaagcgttagaagagcaggaagtacccatcggtgccgtggtggtcgcggacggacgtatcgtcggccgggggcacaacctggtcgaaaccttggcggacgctacggctcatgcggaaatgcaggccctgacagccgcagcctcgaccgttggaggcaaatacttgtccgaatgtacgttgtatgtgacggtcgagccttgcatcatgtgtgcgggggcgattgcgtggagccaggtggggcgggtggtctatggcgccgacgatccgaagcgtggctatcgccgctattcggagcaggtgtttccgccccgaacgacggtgacgcggggggtattggccgaggagtgcgagaggctcgtccgttcgttcttcgccgcgttgagaaggtgatttttggaaagtgccgaaaaaaaactaaatttgcattccctgctttccggcaggagtttcgacggatggttgcgacctacagaacggggcgatatttccgatgggtttgcagggaatggtgataaaaatggacggaacctattttaacctataatttatacaatatttatgaaaaaacttttgatttccgcgcttgccctgttcgttgtggggtctgtggctgcgcaggaaggattgggcgaaacttacaataaggctgtcgccgcttacaattcgaaggattttgcatccgcagctacggctttcgaaacgcttatcgatcaggggctcgattccgaggatctcgatgtccagagttgggttgcaacggccaagaagagtgtgccggtgtgctatttccaaatgggtcttacggctgctaagggaaatgatttcaacacggcggtcgagaatcttaccaagtcggccaataaggcggctctttacggtgagttgcagcaggagcgtatgtcgaatatgttgatggcgaagatatatctgatgtggggcggaaagcctttcaacgaaaagaactacgccgaggctgctgaaattttcgccaaaggttatgccgccgatccgaaaaatatggagatggccaacttcttgggcatttgctattgcgagctgggcgacttccagaaaggtttggttattttcaacgaaatcgcttctcaggacaatcccaaatatgcggaggatgtcgtgaaggtaaaggagaacatcaagctctataccaataaccgtattgccaagttgcagggcgagaatgatttcgacggtattatcgccgttgccgacgagatgctggccgtgaatctgcaggatgcgctggcccagaagattcgtttgcaggcactcttcgacaagaaggattacgctggcgtgatcgcttctgctgaggaggctgctgccgtgcagaccgacgaagaggagcgcagcgacgtttatttcattttgggtgcagcttacaatgcccgcacgatgccccagcaggcgatcgacgccctttcgaaagtaacggccggtgcgaatgtggctgcggcacagaaaacggtggcacagcttaaggagaacgcagccaaagcgaacagttagcggggtattcctgtttttgaaatgcggggcagactttttcggaagtctgccccgttttattcgaaagggctttgacttccgggatgcacgcgggggcggttcagcggatggttttgcactttatcgcggcgggtcggttgtcgggccgattcaggaggagcgggagcctttgtgccgcaagtcggggcggtggcggtgagccggccggtcgggttccggttttcctgtcctttcgtacggaaggtttcccgaacagcctgcggacaatatccggagaggtttcgggtcggtttgcagtctgcctctccgcccaatggcgggccctactcttcgttcttttcctggtttatccgcacgttttgctggatgcgccgcagtccgctgcgtgcgagaggtgtattgccgaacagcaggagaaactcctcttcgctcattgcgagccactcccgatccgaaatcgtcagcgggtcgaacaggggatcgaaatgcggcgagcggtgcatgggggctttttggttgtggggacagcagctctggcagcgatcgcagccgaagatccatccgtcgaggtcgggcagggcgctgtcggactccttttcgatcgtacgacaggagatgcagcggttcgtgtcgatcaccttgggcgcgacgatggctcccgtcggacaactgtccaggcagttccggcagcggccgcaacgggctcctgcgaacggggcatcgtactggtcggacggcagggtaagtaccaactcgcccagcaggacataggagccgtattggggcgtgagcagcagggattgccgcccgatccagcccagacccgcttcgacggccagttgtttttccagcagcggagccgtatcgacgaacgtgcggcccgtgagcccggggtattgccggcgcagggcttcgagcatcgtgcccagcatcctcttgaggacggggtggtagtcgcggctgcgggcgtaggaggcgatttttgtgcggcacccgggcggatagccttcgcccagcgggttcttgtagctcacggcgcagaccacgaccgtctgcgccccttcgaccaagtgtcggacgtcgaaacgtttgtcgaggttgcgttcgaggtattccagcgaggaaccgtagcctttggcgagccattcgcggaagtaggattcgttctccgcaagatgcttgcagggcgtgattccgcagaggtcgaagcctgcattctcggcaagttttttgatgtattgaccagagatcatggcgataattcggctcaaaaatagtgtatttacggcaaataatagtaaatttgccccgagtatattctcattttaattcgaaagaaaatgactatccatacactttacgaactggttcagcacagtgtaaagagttttgcatcgaaagtcgcttttgccatgtacggcggggaggagctctcctatgccgaggtgggaacccgcgtcaaacacgtgcaggaccttttgatcggagccggtttgaaagcgggcgacaaggtggcgctgttgagcagcaacatgcccaactggtgcgtttcgtacctggccgtcacctctgccggcatggtcgccgtgccgatcctgcccgatttctcgaccgaagagctggagatgattatcgcccactccgaggccaaggcgctgatggtttccgacaagctcttcgctaaattggcgaagtccacgatcgaatccctccatatcgtgattcgtaccaagaatctgggcgtgatcgcctcccgtcctgcggcggagaaaggggcggtcggaattccgaatcccgaagacctcgcggtcatcatctatacctcgggtacgacgtcgcgtcccaagggcgtgatgctctcccacgcgaatctctgtgcgcagatctccatgagcgccgccatttttccgatctttcccgacgatacgtttctctcggtgctgccgttggcgcacacctacgagtgctcgataggtatgatctatcctttctcgatgggggcccgggtcgtttacctggatcgtccgcctacggcctcggttctgatgccgacgcttgccgaggtacggccttcggtgatgctcatcgtgccgctgattatcgaaaagatttatcgccatcagattctcgccaagtttacctccagcggattctggcgtgcgctctacaagatcgatttcatgcgccgttatctgcatcgtgtcgcgggtaagaagttgatgaaggtcttcggcgggcggctgcgcttcctcggtatcgggggtgcgaagctggacggcggcgccgagaagttcctgctcgaagcccgttttccgtacgctatcggctatggtttgacggagacggcacccctgttggccggtgcggctccctcgcaggtgcgcttgggttcgaccgggcctgccgcgccgggcgtcgagctgcggttggagaacgtcaatcccgaaacccgccagggcgagatcgttgccaagacgccgagcgccatgatcggttactataagaaccccgacgctacgaaggaggtcttcaccgaggacggatggttccgtaccggagatttgggcgaattttcggccgacgggtggctctatatcaagggccggctgaagaatatgatcgtcggtcccagtggtgagaatatctatcccgaggatatcgagagcgtcctcaattcgcacgtctgcgtcgccgattcggtggttaccgagcacgaaggccgcctggtggcgctcgtgcatttcaataccgacgctctcgaagccaagttcgacggctggaaggaggatttcgagaattggaaggagaatctcaagaaggaggtcgtcgattatgtgaattccaaggtcaatcgtttctcgcgtatctccgaggtcgtggaggagaagcaggagttcgtcaagactccgacgcagaagatccgacgtttcctctataccaagcgcaaccctcaccagaaacacgaaatgtccaagcggtaggggtgtgtatgcagttatgattcaggtgcagatttcggtttgcgcctgaatcttttttcggacggtcgggttgcttcccgatcgtttcctttggccggagctcgtcccgactttccgatagagctgagctgtgtctgtgtcggggcagtgcggaccggatgccgctgtttcggttccgtatgctcgttcgtgtctgttgcctccggcggaatgtgcagcggtcgaggttttaccggagcgtctgtttttcggatcccgatttgtacggcacaccgccgcttcgcgttgtccggtttcccgggaagagggatttcttgcagcgtgaacttcgcaatttctactttgagggttgcggacgctgaaggcgttggcaaaataaaatcggaaaagacgcacgggtcttttccgatttcgttgtatggattgttcgcagtcggcaggacggatttttcccggatcattcgggaatttgcaccgagtccgacggtgtggacagatcgggatggatcaactcgttttcataaatgcccagcgtgcggtagtagtcgttgagctgggccagcacgtcttggcgtcccatgtaggccgccagatagtagagccggtcgagcgattgcatcttgtcgatgagtgtctgcgtgaccatatcgccctgaatgccttggaaatcgaggtagtagtcgatatactgcatcaggttgcgggcatagctcatcagcaggccgtcgcccttgtccggggcaccggccatgtagtagccttcgatgaaggggagggtgttggcgtcggtgtagcggatctgttggggcggcagtttttcgagtcccatgtcgagcagccggatcgcctgtgtcgaatccccacggaaaacatactccttggctgcacgggcgaaggattcgcgggctttcgaggcgctcagggtatgttggatggtgtggtcggcgtaggttcggggatcgctcaggtttccgtaacggaatgtttcggtcagcaacggcgttacgtagtccggatcgacacgcccgatctcctgcacgttcctgcatggcgtgtagatcggtaccagccggtaagtgtaaccgtcgaactggaggtaatcgagcagcccgagcgattgcaacgtgtaaacctgtgtgaaatggatcggacgcttccagtcgaaatgggccagcatgtcgagcagcatcatctcgctcttgtcgatcgcccgtttgggcagttccatgtagatcgtatccaccatcaggtcacgatcggcttccttgacgatgcccgaggcgatcgcgttgtccttgtttacgggcagggcgaaacggttgctcggcaggtagtcgattttgcttccgttgctcagaacaagtttggtgcgcggatcttcgttgcggataaaatcgatggcctctttcagctccaacgggcggtccacgatgttttctatgggcagcatgtcgttggtgtaggtgtatttgctgcgtggcagcgtgaaggggatgcccggcgcatcgttggctttggttttcagttcgtcgatgtaccattcggcgcccaggtagctcgtattcacgatccgcacgtccgggcgcacgccgtccacctcctgattgaaccacagggggaaagtgtcgttatctccgtagttgatgacgatggcgttgggcagtaccgattgcaggtagttccagccgatgtcgcgggctatcgtgcggtgcgaacggtcgtgatcgtcccagttttgggccgcgagaatgcccggtacgaccatgcagacgaccgtagcggctacgggagccatgaggcccttgcgtcgggtggcccagacgatcaggtcgcgcacggcgagtacgcccaggccgatccagatgcagaaggcgtagaacgaacccgcataaacatagtcgcgttcgcgcggttcgttgggcgaggtgttgaagtaaaccaccagcgcgatgcccatcatcacgaagagccacatgacgatcgagaagttgcgcggatcgcggttgagctgatagatcaggccgataagacccaacaggaaggggaggaaatagtaggtgttgcgccccttgttattcgctatttcgtccggcaggttgtcctgcggtccgaggtaaagctcgtcgatccacttgatgccagagagccagttgccgtcggtgatgatcgcgtcggtaggctggatgtcgctctggcgtcccacgaaattccagaggaaatagcgccagtacatgtggttgagctggtaggtgaagaaatagttgaggttctcgcggaacgtcggctccacgattaccagcggttcgtagcccgaaccgtcgtcccaaagcgtccggtgtccgaaatcgagcacttcgatcttgttcgggcgtccctgcgcgtcgcggacgatttcgccgttttcatcccgttcgtaatcggtccgggtgcggtaggcgctccatgatttgtaactctccttgctggcagcgtagttccacatacgggggaacagatgcatgaactcgtcggggtgttcgtacccggagatgatcgaaaccgttttgtacttgccgtcgtcgtccaggtagcggacatccttgtatttgtaaccggaggtcggggccgagaactggggaccgtagagcagcggtttgtctccgtactgatcgcggttgagcagcgaatagagggcgaacggattgctcgggttgttgctgttcatcgggggattggccgcggcgcggatcgtaaccgatgcgtaggacgagtagccgatgaggatcatcagcgtcgagagcagcacgagattgagcaccgtgcgcccttttttatgggtgaaatatacgcccatgccgagcgctcccaacagggctactacgaagaacacgaggccggaattgacgggcaatcccagtgaattgacgaagaagaggtcgaacaaggcgccgatatagaccgtatgggggatgatgatactgttgatgaaaaccagaatcgcgcccgaaatgagggtgctgaccgcaatacctttgaacgtgatgcgctgcgttttgcggaaatagtagatgaataccagcgcgggaacggtcagcaggttgaggatgtgcacgccgatcgaaagccccatcaggtaggcgatcagcacgatccagcgcatcgagtggggctggtcggcctgttcctcccatttgagcatgagccacaccaccagggcggtgaacatcgacgagagggcatatacttcgccttcgatggccgagaaccagaaggtgtcggtgaaggtataggcgagtgctccgaccgcacctgtacccaatacggccacgatgttggctttcgtaagctccgcgccctgacgggtgaggatgcggcgtgccaggtgggtgatcgtccagaaaaggaacaggatgcagaacgcgctggccaggcagttcatggcgttcaccatgtggggtacatagtacgtcgagggtgccagtatcgtggccaggcgggccagcagcatgaagagcggtgctccgggcgggtgccctacttcgagtttatacgaggtagcgatgaattcggagcagtcccacaggctcgaagagggctccatggtcagcagataggtcatggccgcgatggcgaagacgatccagccgacgatgttgttccagcgtttgtagctattcatttgagtttcggtttgtccgcaaaacggcatgtcccctgcgtgcgaagtcgaacgttcggttttttagggcagtccgtcggatttaagtctgttgttgtgtacaaatacgatgaaagccgggtgcaaaatcgattttgccggattttgccgcaacgggtttcccgtgctgtgcaaagatagtgaaagccgggagaaaacgggaacaagttcccggttttccgaggcggatcctatcttctgcaaagatattaagataacgcttaaatcgggtgtttatttttgttttttgttcggattctttattatcgtcggtaaagtatggggtgccgcaggccggaatccgggtatatgaggtgcgagattcgttcgattttcgggggatgcgggattccggttgtctgccggattctgaaatttcaacagagaggagtatgtgttggcaaagggagagtatatgcggatctgaatcgtgttgtggaatgaattcggaaaaatttttataaggaatgccgacctgtgaaaaaccggtccgattcataatcggaccggtttttttgtcttcggagcaactcctgaaagatcaataggagtaatcctcgcagggaagttttccggtgtattcgatttcgagctcggtatttttgtcgtcctcgtcgatggctttgaacgagcccgtaatggtatagtcgtcattgccgttggcgacgattttgagagttccctccgtgattctgttcttgatgattccgtaggtgggatcgttgtagttccagaaggatttcgccagatcgaaagtcatgttctcaccggcggcaccgcccgtgtagtcgccgctggcgagttgcagaggatctgtgggcgcgagcgtaatgtagaacgtgatgccgtattcttttatcggagagccatctttcaggccgaggaagaatacattgtccccattgtagtagaggtcgccgacggtcatggttgctttcggtgcttccggagccggaggagtcgaatagttgttgaaaggtactgtgccggtaaaatcgatcttaatggctgtttcctgtccggtgtcgctcgctccccggagagtgccggttacggtgtagttgtggttcccgttgtttgtcacggtgagtgaaccttctttgatcgtatttttgatccggtcgttgaaattctccttgtcgatgaatgtccaagaggatttggctgcgtcgagggtcatctctccgctgccggtcgatacggggtagtcgccgctgacgagctgcagggtctccgaagcgggtagtttgaacgaaagcgacgcttcgtaagtatctgtcgggttggcgtccttgagggtcagagtatagatattgccgtcgtagtagtccaggttgccgatggtcatggtcacctccgcaacagtcggttccacgggttccggatcggcgtagtcctcgaaaggaagagtgccggaaaagttgattttcagagctgtgtttttaccggttttatcggatgtaccttccagtgtgccggtgatcgtgtagttgtggtcgccgttgctgacgatgtgaattttggttccctccttgagccggtttttgatcttgtcgttgtggttgtccttgtcggtaaagttccagaatgacttgctcgcatcgatggtcatctcttcgcctgtcgttgctgccatatagtcgccgctggccaacaacggtgaatccgaagcgggcagcttcaagtaaaaggttgtctcgtagagatcggcgggattggcatccttgagctggagataatagatgttgtcgttgtaacgatacagggagccggtggacatggttacctcaggcacttcgggtgcgggatcatccggagtatccggatcatccgggtcttcatagtcttccgagtaatcggaaatcagcaaccgacctgtgaatgcgaacgctacgcccgcttcgttttccataatggaacccccgtcctgaatggagccgcctttcatgtggcctctgatcgtgtaggtcatgttgtcgccgatggcgacttcgaattctccggcttcggcaacgtattgtgtccatttgggggcgaccacattccagttggaacggtatctagtcgtatttttattgttgaacgtatttatttcccaagtggaggaggcggtgtatttcccggccggaagggtgaagctacccttttcctgtcgtgggacattgacataaaagcatacgctacatccgcgggcagagttgttcaggtctttcaggtagaggaaataaacggctccgccttctttgctgtattcactgtcatgcccgtagtacatcagttcgccttcggtcatcgtatgggcgatgtacccggtcatgggcggattgggatcgtccggaatttggggtccctgtgggtcgtccgggtcgttcggctccgtctgctccataccgttgtctttgtcgctgcatgaaggcaggcatcccaaaatcccccccccgaacatcagcaacatccatgcgaatctaaagtgtttcatagcgtaaaaggttttagtgccgggcctacggcaggtttttaattttcggcagaaacgaggccggtcttaaaaaaaagcgctttctgcttaagtgttttctttcatgtaatagagatgttgtttttctttgttggaaaaaaatagataaaatattcggtatttgcaaatgtttttgtcttttttaatttattgtgtgtttttattggttgaaaaattgggactatctcgttcgacgaagtttgaaacgatatttttaagtgaggagacggtcgagatagtcgtctgtcggttgttaagaagatcagtccggactgaatgtccggactgatcgggaatttttcgtatggagccggtctgatgcttttctcctgaatggtagttttcaggagaggcgtagcgatcggtgtaatttcgacggttgccgtcgtcaatgttgtatggatgtgtcgtttgtcgtaatagggatgaatacgatgtccgaacagcgcagggcttcgtcatcgacggcaaaggcataaatgtagtatttggagttcggttcgagcgtttcctggatttctctggattgttgaaaggtatattggctcaggatcatttcggccgtgtagcccatccatccgtagatctgtacgttgtcgatccaactttccgatattttctccaaaacggtcgcatccgtatcggccgcatcgacgctgccgtagatctttgcgacaaaatggccgtcgtaatcgttcgctttgacaagaacgtcgatgttgagaccttcggtcgaaacgatctgtatgtcgaattttgtgtcgattgtttggggtgccagggttgtgagcgtcttttttgagattggggtcagcctttcgatcgtgatgggatccacgccgtatgcgtaaacgaggtattcggtatcgggttccatgttttcgatcagcctgtctgcaatagtcccctgttcgaggtattcttgcgcccagctttgccagccgctgcccgttgcgtccatgtctgtatagaagtcgatgtcgtattggtagagctcgtcatccgtcttgaaatcggcggcagcccgggaggggatgatgttcaacagataatacatttcctggtctccgggacggactgtagttcggaatgtttttgtggtgatgtccgaaatcgttatcgtaaatgcctcctccggacgggccgcctgttttgctgtaaaggaaggcgccggctggatatccgcgtacgaaacttcgatgattgcttctctcttttccgctgtttcgtttttggttacgttgaaggagatgacccctgaggttttggtatcgatgtccgttatccaactgtcgttgcatttggcagacagggtcgcatttgcgacggggttttcgatcgtgtattcgatttggaaaggtcctccttcggccggaacatcgaggctctctttggcgaatacgatttcaggctgtgcattcggaaaggtctgtttcactttgaaagaaggcgccggctggatatccgcgtacgaaacttcgatgattgcttctctcttttccgctgtttcgtttttggttacgtttacagaaaataatcaaaattgtcgcaaactaactaatgaacgaaaaaatttgccttgtttttaatctgaaattttatgtataagggaaaacgccgcattttttcggccctttctccttaacctttatagatacgatgcaattcaattccaccgaattattttacaaactgcatcagatagttttcgcaaaatccatatgagagatgctattgcaccgtttgtcaccgatttgcgtatcaaggtctaactcgttgatatttaactttgcaaacaaaaaaaacgagtatggcaagaagtacattcaaagtgctgttctacgtgaacggcagcaaggagaaagacggtattgtccccatcatgggacgagtgacaatcaacggtactgtggcgcagttcagttgcaagcagaccatcccgaaaaccctttgggatgcgaaaggcaaccgagccaaaggcaagagtgccgaagcacggaacgtcaatctggcattggacaacatcaaggcgcaaatcatcaagcactatcagcgcatatccgaccgagaggcatacgtaacggctgaaatggtgcgcaatgcctaccaaggggtcggaagcgagtatgagacactgataaaggcttttgacaaggattgcgccaacttcctgaaacgtgtcggcaaagaccgcagcatcggcacgtataaggtcatggtaagggcaaggaactatgtcgcagcctttatcaagtcattctacagacggacggacatgtccatgctggaacttacgcccgacttcatcaaggagtttgcggcttatcttacggctgaacggggactgaaaaacgccaccatctggctgaactgcatgtggctgaaaggcgtggtcatgcgtgcgcactataacggactgataccgagaaatccgtttgcgcagttccatatcagcccgaatgttaaggaacgggaatatctgacagaggacgaaatcaaaagaatcatggcgcacgagtttgacaaccccaccctcgcattggtgcgggatctgttcattttcgcctgcttcaccgccttgtctttcgtggatatgaaagaactcacaacggacgaaatagtggaggtgaacggtgagaaatggatattgtcgaaacggcacaagacaaatgtcccgttccaagtgaagctgctggatattcccttgcagataatcgaacggtacaagtatctgtcggaagacaggctggttttcgggaaaatcaactattggacgatgtgcaaacaactgaaaaaggtaatggcggaatgcggaatagagaagcaaatctcctaccaggcgtcaggctcgaatccgaggcgatgtagtccacatccatcttcacctgctcgatctgcgcctgcacatcctcctcggccgtgatataccccgtgggggccttgtcgccttccgtaagctgaatgtcgtagagatacatagaaacaccgtcacggatattcatatatatcttctgcaccacacgcgaagcatcgatggtgcggaccacttcatatactccttccgttcccgccggaggagcggaaagagtttctgtggtgccgtcttcatacctgactctgaacgtcatttcggccccctgcttgatccgggctttgaagacgtacggagtattcggcttgtattttatctggccgccgaaacagtcggggaccgtcgaagcctgcgggatgttggttgcggcaagcccggcctgcagaagtttgctccaattgacatacaaatatgttccgtccgcgtccgcccccgaagttacgacatccgtaacgccctctttgacactgttccattcccggataaattgtttggcgatatagttgcgggcgccgaactttacatcttcttccgcaaccaagtatcctgccggcgccttgttaccttcggtgagctgaacgtcatataggtagatcgggttccaggcaaccacatagagaactattttctgcaaggacttgcccgcttgggtcgtatagaccgcttcatacagctcggatgcggtcggcgaaggcggtgccgacataaattgataggtattatcgtcatagaccgcacaaaacataactccccgcttactgttgggctgcttgatccgggccttgaagacataggacataccggccttgtaagcgatcttacctccgaaacaatccgtccagtttacgatctggctcgtagatgcaatagccactcctgcattgctcgctttgttggcatcgatcctcatgtatgctccatccgtgtccgtaccggtcgttaccacgtccgaaacaccctctttggcgctgttccattcccggataaactgcttggcgatgtagttgcgggcgccgaactgaagattcgcaatttcgtctttggcttcgttggctgccgtatcatcggtgtatttggatgctttgtcccaatccgagctttcgaaattgcccgttgcacgggattcgatacagcgcatgatgtcgccaccttcgccctgcgtccagatgtcacccacatcgtagggtgtagtcggtgttacgacgaatacacgacgtttggcatcggccgtgtcctgcgcccgcgccgcctcttgcagggcctttaccgcatcgctgtcggcgatcggcgtccatttataggttccgtcctcttcttttacccaccgccacgatttgcccgcatcggggttcgtcgtcttgtcgctcgatatggtgaagtgaatctgcgggtattccgccggagtgattttggcattatcggttttgcggatgacaaaagctatgtagggattgtcgcttccgacggtatagctctggctccatacgtaacttgctataaccgctccggatgacgctatcggattgtaacccatcgtatagccttcacccaccgacaatacggcgcctttgggtattcctccgaccggagttttgagccggatgcgggtgctgtcggcgattttgatctgatcccaggtcttaatgccgtcgatataggatgcaccgatgcttccctgctcccagcagcctgcgtccgtcgggtcgaaattcgcgggcagcgtattggtgaacgtgtcgccgatatggttttcctgctcgccatccgctatccatgtttgggccggttcattgtaaagcgagggagtatagggatagaaccagttttccacgacaccgtccagccgtttgttgatctcggacaattcgccgggcagcgtgttatcgatgtaatccttggcctgctgagctttgcgatcggcggaattggcagtgtcctgggcttcggtggccgtctgatcgatctgttcgatgtcgaactccttttgaaactgtcccgtcgcggggtcgtagagcttgccttgcttccagcctgcctccggggtgccgaggaggatgtgcaggcgcagatcgagcaggtgaagatggatgtggactacatcgcctcggattcgagcctgacgccatccgacaaacagcaggtggctaatgaatgggtgcggattcaaggcgaatactggagcatcatggcgaatgccgaaaagtatgatgtccccacggattcatttacggtctatttccaggcactcgaagattatctcacgcccctgctggccgatatgagtacgacatccgagataaccggcaccgagttcagaaaagtattctccgattattatgaaataagcagcaacatgtcggacttgatcgacgacgcgatagacgaatccatcaaatcgacagagtacctcaagaaggctatggaagacggaagtaccgaggtgaaaggcggtctgataatgaccaatgtgatgttgctgaaaaatgctgaaggcgacgtgacggccggcgtgagcggcttgcaggaagacgatgtgcccttctggtcgggagccgactacacaaaccggaaaaaagccgtgttcagagtacacgccgacggggaagtacacgcaaccaaaggaaccgtcggaatcctgcaggtcaaaaacaattccgtagaggtgagcgatgcggccgcaagcggaaacaagatcatactcactactaacaatataaacagcgtaagccaggttttgggttcttccaaagtcccgcaagtacggtttgggggcaggtacgggaaaacctactgccgaaaggcagtaaggcgttctgtaccgagcctacgactgggcgaaggcggttccattatcgaccttgtaatgcggttggagcggtgcgatttcgcacacgccgtccgattgctgagaaacagagagagggtaccgatcgctgcaccccgatctttgtcgcctttatcgaccgttcccgcgctccgtatcctctccgacacaccgcttcgtcattcggcattgctcgactatttacggcggcgcggtatcgttccggaggttgcctgcacttattgtcgggagatacgctatacgatcaatggcagaaaatatttcgccatcggatttccgaacgatgccggcggatgggagttgcgctcggaatgcttcaaaggaagtgcatcgcccaaacagattacgacgatcgacaaccgcaccgatacggtaatcgccttcgaggggttcatggattttctctcctgcctttcgacgaagcaccccgaccaactacgcatcgacgtaatagtattaaactcggtcgtcaatcttccgaaagcgcttccgtttctcgcacgccattcgacgattcatgctttcttcgacaatgacgatgcgggtcgtaaagcgaccgccgagttgattcgtctttgcccccgcagcgaagtcgtcgatcaaagctgtttctactccggacacaaggatgtcaacgactatctgatcgcccacataaaagaccatgcgaaaaagttggcggcacagaaaaacgcctccaaaacaaagacggttcaatctgttcggaataatccgcaacttctaaaagcaaaaacagcggcggttgagccacaacgccggaaaggggtaaaggtttaggaaggcaagtttgtgttttcgtaaacgaaaacctaccgaacatcccgctggtctaactcctgcacacaaaccgatgaaacaagcacagaacaagggcggacggccggaattgagtaaaggtcgtgttcgccgatatatcgtcagtacgcgactcgatacggagcattatttacgtcttcggtcattggcccgtacttcggggcagcgtccggcggaaatcatccgacaactgcttcggacaggagcggtacgagaacgcctgcgtcgcgagcatctggatttcgtaacccagctcaaaggcatagctcgcaacttgaatcaactgacacggcttgcccatgcgaaaggattttcaagtgtcgcatcccgtcacgcggccattatggcatgcctcgaagccctgctaaaacagatccgcgatgatcggtaaaatcattgccggttcatcctttgccgggactgtcggctatgtgatgaaggaactgtcgcgcatcctcgatgccgaaggcgtaaacccgccggaggtaaagaacataatcgaggattttaaggatcagacccgactgaaccctcggttgaaaaacacggtcgggcatatctccttctcgttttcgccgaaagaagctccgcacatgaccgatgcgctgatgacgcagatcgccaaagaatatatgcagaaaatgggtattaccgacacgcaatatctgctggtacgtcacctcgaccagccccattctcactgccatctggtctataaccgggtcgggaacaaggggcagactatatcggacaagaatattaaaatacgcaatacgaaagtctgccgggaactaaccgagaaatacgggttgcatcttgcgccgggaaaggacagcgtgcggcgggagcgattgcgcgaaccggacaagaccaaatacgaaatatatgatgcgatcaaaggatgtctgcccaaatgtaagagttggaacgatctggaaggtagattaaaagagcaaggcatcgacgtccgctataagtattgcggaaataccgaccgaaaacaaggcgttctattttcaaaaaacgacttcgagttttcgggatcgaagatcgaccggcaattcagcttctcgaaactgaatctgcattttgcgtacgcacaacagcaaacccgacatcgaagcgctattgtcaaagacttccatgcggcggcaggttcctaccgttcggccttctccgatctgttcggaacgggtggcggaaagaccgacacggataggccgacggtcaatttcggcggtaatatcggcgaacttccgttgccgccgaatagttcgccggtcgaattgtccgaagcccaattgcaacgcaaacccggcgagaatcccgaagagtacctcgcccgcatcacggcattgctcaataccgtcgccgaagcgatggcgattgccgcaatggagcgggaacgtcgcttgcgagaacgcatgaccaaacccaagcagaaattgtaaacaggaagcgatacaaccatgaaagagaataatatgatgtcctacgaaatgtatgaggacttcaaggagacgatggtcaaaaccatcaagaccgaactagcggcaaaaacagcgaacaataatcaatcaagcgacaatgacttgtcgcaacgattggagcaaatcgtatatacagaacaagagcggcatcaggcgataataatccagcttgccggacgattggagagcatagagcagaactataccaaaacgcaaaccggtatcgataatctgcaagcatctgtcgaggcaatcaaaatccccgccgaactgccgccgagaataatccgacaccgagtgattttcagctccgaatccccattcgtcatttatttggtgctgttccttttcataagttgcatgattttgtcgtcggcactctatttcgctacccgaccgaaccgagaccgcatcgataacgatctgaaataccgctatataaagatgaaaggcgacgcgacacccgaacgtatcaccgaactggaagagctattcgaactaaaccgcgacaacgcaaaaatccgtcagatgaaaaaagatgttgaaacctttgaaaaaatagcaaggcaaaaagccgtgcatgacgaacaagtacggttaaatgagcaagcagcaaaatatttcgaacaacaactcaaaaaaattaaggcagattaaaaatgtattttactattagaaagcctgatgattaacataaattgtttaattttgtatgagtattaaattttaaagaatataacgcagccataatctgactggaattaaaatatgggaatgattctcgactatatagaacaggcaggaaagggcaaatatcaatgcttcaagacaaaaaagatatgtcttgattcagtagataatgacactattgcctataattatgatgataaaacaatcgcaaatgctactaaaagtacattcgcggaaacagatcattctcgtgtaaaaacagtatccatcgcatatttgttcaagtcacccaaagttcctccacccatttttcaatattttttggatggatcgcgacacactttcaaaatagatgatatcggtattggcaaaaagatatttccaatcattgcaggacaaattattgttgggtgttgcaagcgaaaagatcgcgatacctttaaatgctggcaactgaataacaaaattgttatggcaatgccagatgattatgacgatgacgatggcggtgagaatttttgccggtcattttgtgaaactattaattctaaagtaatagataagatatcaaaattaaaagatttgcaattaggcatcaataaattgcttttgtacaggactaatattaatccacaagaacaaggccgggataattacaaacatcggggcattgcatgtattcagaacgaaatgaccgatgaagaacaattgatggttgagagattatgtaaagttggaaagttacataatgaatcatggttgattaaagatggttctttggaatataatccgagtttctcaaatttaaacagaactcaatgggataacttaagaagcaactatcagcatgtagttggcgtttcaaaactcttcgaccctgaattgttgccggattttgaagggaatcggttatcgaaaactattgcaaatttaggaccttacgaacgaactaaagtttaccgttatgaatcagaccacaaaggtggaaaatcatattttgccgtgtggtatgtgcgattacgtaaccacgattttcgagaaacacatttttctgacatcgtaaagtgcgaaatggtcttgatggatgaaaatgacaaattggaaacagacaaggttgatatgataagcgcaaatttaattcgagaagcttatccagtttgctatggcgttgatacacgctgggcaaatcacctatatccaattttcttgacagaatcgttttgcaaatcgaaatatgtggattcgaatataatattaaatttattctaaagatgttacaggttattggaaaagtatcggcaactgaaaagatgccatctaccattgataatttctatttttggacagataaaggacaaattttgagtccgttcgacatagttaaagttgaacatgtatcctctaatagcgataagtctattacatatggagttatcgaagaaattacgcatgtaacggatgctgcgagccatttcactaattttatatcaagtaattttggtgatacagctgattctattgggcaaatgaatcggcttggaatgaattacgtaaaagcaaaagtcgtttgcaatactgatgatatttataccccagtactggatggcaaacaagtctcgctttgtgacgaagaggatattcgaacggctttaggactaaatgatgtaaaaaatcctttggtgtgcggttatttggaaatgtaccaaggcaatgcagccaaaaaagttaaagtcgagcttaattctcactttttaattggaccagacggagcgcatttgaatatatccggtatttcaggattagcagcaaaaacatcttattcaatgttcctccttaatgcaattcaacataaattcaaagatatagacggaagtagtgtggcttttgtgtttttcaatgtcaaaggacgagatcttatggccattgatgaaacgaatacagagctgccggagaaagataaaaagatatatgcggatttagggttatcaatagaaccctttaagaatgttcgctattactatccttacacaaaggatgaaataatgcaacatgcgcaatcatacgctcatcctcaagacgttgaacgacaaaagaaaaatcacaaagcctttacatataaattcacctatgacaaatctcaagataaattggatttattgttggccaatgaagatgatagtactggaactttagaaagctgcgttaattatgtcataaatggagaagggtattttgccggtgtgaataattggaaagattttcaagataaattggatgagtatacaaaaaccgctgccaatggaggtgtaaagaatgaaattcaagtaactagctggagaaaatttaagagatgtgttagtaaagcgatcaagaatgatattttctcaaaagtaatacatgataacgtaggagaagtagacctcacaagcgagattcaacacaatctgacagctaatcaggttatggtaatcgatattgcccgattagacgaaaactctcaaagtttcgtttttggtagtgtagcccgtgcaatatatgaaatgaaactgggcgctgatcgtgataatattcctgataagataattttgtttgttgatgaattgaataaatatgcttcgaacgatattccgaaaaactccccaattctacgtcaattattggaaatcacagagcgaggccgatcattaggcattattctattttcggtggagcaattccgaagtgctatacacgatcgagttaagggcaattgttctactcatgcttatggtcggactaatgctatcgaaatatcaaaagccgattacaaatacgtgcctaaggtctatcaaaatatgatgacgagattatctcccggggaatatattatttccaatccggcattacgatcgattgtaaatattagattcccaaggccgacatacaaacaatttcccaacggataataaactatggcagagctgaaaacgcataaatcccgcattggtaaagggcttataaacatgctcatgtttcaaatgtatggggatgaaaagctgatctatcgtgaatatgttcaaaatgcacgagacgctatcaatgatgccgtcaatcacggtattttaggagctataaccgatggtagaatttctattactattgattctgccaagaggtttatagaaattagggataatggcattggcatacccgtagaacgagtcgaatccgttttgctggatatagcagattccaataaggacggagaatcatccgcaggtcagttcggcatagggcgattagttggcggctatttctgtaaaaaattatcatttagaacaacctacaaaggagaagagtttgcttcggaaattgttttcgatattgataaaatcaaggcgattcttaatgacgaaaacgataaacgcgatgccacggatgtaatagattccgcgtcatctcgcaatttatacgatgaaaataaagatgaccattattttatagttactttatgcaatattgatttacaatatccagcattgttgaataaagacattattgcagactatttaagggaagttgctccagtcgattattcagctcaatttaggaatcaattgattatgaccagtgtgtcaggggaatatgaagagttacaaaaaaatgttggatatttcccaatctcaattaacggcacggcgatagaaaaacgatacggattacgtgtcgttggaacaaatgatacaatcaacggattagagtatttctcgttaaaagatgatacatacggattgttagcatggggctggtacgccttgaccgattttaccaaagcaattcccgtatcagatacaagcagccaatttcggctccgaaaacacaatattcaagttggagaagccgatatgctaacaacttatttccctcgtaatgaaacccgaggtaataaatatttttatggagaaatccatattgcgaatcaaaaaatcaaactaaatagtgcccgtgacggattagctcctaccccagaagcagaatgcctaaagtgtctaattcgaaatttcttcgatggattagttaagttatatcatttagccaatgatacaaaaaaagcagtcgagcgttatatagatgcttacaaaataattcaagctcccgcaactgaaaatatcgttaatgctcaaaaacaattaacagatgcttgcaaaaaacttaagagtatcaccaaatccaagaatgcaaccaatcctgtagcacaaaaagtactggagtcgtataaacggcgaatcaaagacttacatacagagatggaccaagagataccgtgcatacctgcatctgaattacctatatcaagtcctatcccgcaggttgaacctgagctcgatgactttgaaatattgaataatcactatcccgaagaccttgcagcattaattcgcagagtgtgtatgtcatatcaaagaaactgtccggtttcacatattaaattaattagagaattacaacgaaaagctataagagaacttatagaagaataatggcaagacctcgaaaaaaattaaagatactgcttatagagccaaactattcaaataagtatccaccaattgggcttatgaaattatcgacctatcataaaatgttaggtcatgaagtcgttttctataaaggggatttaaaacagtttgttatagaacgcattgccaataaatgtattgatgagttttataaaatagatgaaaacattaattggaatctttacaaagatttgtttgttgagtatattcgtacaaggcggcgggatttcttagttcaaatcccgattagctccacaaatatggagattcttttgacaaacaaaattaatcagtttaaagattattattggaaaaaaaactgggaagcagatcccgaatgggatcgcgtctttgtaacaactttgttcacgttccattggcgcattactatcgacaccatcaattttgcaaaaaaactagttaaagacacaaaaaatttgatggttggaggtgtattagcaaccattcaagcaaaagaggtttacgaggcaactgggatcaagccatttaaaggaattttaaacattcccggacaactagataaaaggaatcaactcattatcgataatttgcctttagattattcaattcttgatgaaattgaatataaatatccaatgaacaatgcatattatggatataccacacgtggatgcataagaaaatgtccgttttgcgctgttcccaaattagaacctgtttataattcctatattcctcttcgagagagaatcgaagaaacccgaaaacaatacggtgatcaaaaagaccttttattaatggataataacatattagcctcttcggagttcgatacgattatcaatgatattgtagcttgcggatttggtaaagacgctatatttattcaaccagatttacttgcgttatccattgctcatttgcgctctacacctgtgattaacgaacgggcaaatattagaaaagcccagtccttaattatggaattttaccaaaaattaaaaggcgaagaatcatttgagatatataaaatcatttttgaaaaatataaaattaataagcttcttacgactacaaaagaacacctgctcgccgcatatgacgaaataaaggatatttataagaaacattttaaacctgctcctcgtcatcgctatgtcgatttcaaccaaggtgtagatgctcgtttatttaccgaagagaatgtcaagcagttaagcagaatcgcaatacgcccgttaagaatagctttcgataatataaaaacggaagcacaatatactcgcgcgattgaaatgagcagcaaggttggattgaaagatttctccaactacttgttatataacttcgatgatcatccagatgatttatatcatcggttaaggatcaatgtagaattgtgtgatcgattaaatgtgagtatctattcttttcccatgaaataccaccccatccgtcgcacggaagatatggatgaggattattctcacaatcgagactatattggcaaatactggaatcgtaagtatatccgagctattcaggctgttctcaatagtacaaaaggtaagattggcaagggaacatcatttttcatgaaagcttttggcgaaaatatcgaggaataccataagcttcttgaaatgccagaaaccatgattatttatcgttatttcttcgaatggcttgggctggaaaatggcggaaagaaaacggctattgagattttaggaaatgattcgatatgcaatgcatcggcccactcgtggtggaaagccttttgtacttgcaaggaaaatgtatcatccaaagaatgggaaatggcgttgaatattattcataaaaatgattttagcaaatcatatcatactggaaattcttatgtcgatacgttactgggatattatgtcagctatcgacaagctattatcgaacctaatacggatctgtataaactaaaacaagtatatgaccaaaatccgctcaaagaattaagacggacgcaaaaaatcaaataaatatattgttatggaaaatgtattgttattagaaataaaacaactatatgattcattagttgcagcaccttatggagaatatgtacatggttatggtactcaaaagccgaatggatttaagtataaatcaaatgctcaaacattatttaataaggttgtagagttgaatgagaaatgtcgtccgtcttatattgatgaacaaacgatatttcagttatcgcatactttggaaaaagaagtagaacatgttgttggaacatatgaggaagctatcaaaccaaatgcagcccaaaaacgatggcaagaattagatgataaaatgaatcgagcaacccgccaaattcatctggatatctatagcttgttatcttatattgaagaaaccagccacgaataaaggttggtattacaaatgtatgacaattcaaaaataaaaccgcgttgtagatagctgcaacgcggtttctgtgaggtctgaagcggattcgaaccgctgtacaaggttttgcagacctttgcctagccactcggccatcagaccctgattccctggatcgggtttgcaaatatacgaagatttctcttttctgcaaaacttccgggcaactttgcatttttatcggcaaaaacctatctttacaaccgctaaccgaagccccgaagcgggtccggaacctacggtttcgcccaaaagaggcggagccgaactcattcggggattgccggatacggaaaatgaagcgcgaaattccagacatagcccttaccctcacgccgggaataggcccgaaaggggcggtccatctgctcgacgtattcggttcggcagaggcggttttctccgcttcggccgacgaactcatcgaaaaagcccgactccgaccggaactcgcgcgggcgatcctccaaaagaaagcgttcgcagacgcagagcgcgaagtcaaacattgccgcaaacacgggatcgagatcatcgcctccaccgacgcacaatacccggccctgctgcgcgaaaccgccgactacccgcatgtgctgtatgttctgggttccccggaagcgctcggcaagacgacgcttacgatggtcggcacgcgtcggatgactccgtacgggcaacagatggccgaccggctgatcggcgaactggcagaccgggtggcggatacggtgatcgtgagcggcctagccttcggcatcgatacggcctgtcaccgtgcggcgctcgctttcggcatgccgaccgtcggcatcatcgcctcggcccttcccggcatcacgcccgcacagcacacggccgtcgcccgggatatgatcgaacacggcggagccgtcgtttcggagctgcactcccaaaccaggcagaacggcaacttttaccactcccgcaaccgtctgctggcaggcataagcggcggtacggtcgtcgtagaatcgcccgtcgaaggcgggtcgatggatacggcacggctggcggacggctacaaccgcacgctgatggccgtccctggacgcgcgacggacttcgcctcggccggagccaatctgctgattcggacccagcgtgcccaaatggtatgcacgggcgaagatatcgtgcgggaaatgatgtgggaccagaaccgccccggcgatctgatcgaccggccgacagcggctcccgcagcactcacgcgcgacgaagaggggctgctgggctgcttccgcaccgacgacccgatatccgcagaagagctttgcgaactctcggggctcggattcggcgaactttcggccctgctgctgggactcgaaatggccggagccgtccggcagcttccggggaaccgatatatgaaactacgctaataaaaaataaatacaaaatacactatcccaatcctatgaaacaattcgtcatcttatttcttttatttactatcagcccaatcagtttcacttttgcacaaaacaaaattttctgtgaaattattgaacaaatcgtaagtcagaaaaaaactcgaatatacctcgattacgggcaagaacgcaataaaaagaaagatatcagactcgaaaacgaaaatgaaaaagctgaaatcttctattcccgggtggaagcacttaacattatgtccgcattgggttggaaattcgagcaagcatatgtaaaagtatctggaagcagcggaaacggatatggcagtacatcaagtacaactcactacttgttgagtaaagatgtagattcaattcaggaaataaacaacattattgatgaaataaaagcaaaaaaatccgaattaaataatatacccaccgaatcagaacaacgagacaccaactctataaacaaaatattttaagacaaaatttccgaaacattgaattatctgatcgacacccactcgcatatctacgccgaagagttcgacgccgaccgcgacgaggcgatccgccgcgcccgcgaagccggggtggagcggctgctgctgccggcgatcgactccgagagccacgggcgcctcttcgacaccgtgcgccgctatccggaccactgcaccccgatgatggggctgcacccgacctccatcaacgacaatccccgttggcgggaagagctggcgttggtcgaacgctacctctgctcgccacccgaaggcgtcggacgattctgcgccgtgggcgaaatcggactcgactactactgggacgaccgcttcaaggccgaacagctcgaggcattcacgaaacagtgccgcctggccgcgacctatgaccttcccgtcgccatccatacgcgggcggcctggaaagatatgtgccgcactgtcgaaacggaaacgaaggccgcccgcgaaaaagggctgcgcctgcggggtgttttccacgccttcgccgaagacgccgacacctaccggcagttgaaggagtgcggcgacttcctgttcggcatcggcggtgtggtgaccttcaaaaagagccggctggccgataccgtacgcgaaatggagctcgacgacctggtgctcgaaaccgactgtccctacctgacgccggttccctatcgcggccagcgaaacgaatccggatatattccttatatttgcaacaaaatcgcagcgctgaaaggcacgacacccgaagaggtagcggcagccacgacccgcaacgcccggcggatgttcggcttcgacgcggcgcgacagacgacaaacgaccattcaagccctaccgaatcgatatgaaaccttcgatcctgattatctataccggcggcacgatcggcatgaagcccgacccgacgaccggcgccctcgtaccgttcgacttcagcggcatcttcgaggagttcccgaccctccaaagcctgaacatcggcatcgaggtattcacgatggaccccgtgatcgactcatcgaacgtcagcccccgcaactggctcgacctggcggcgatcatccgcgacaactacgcccgctacgacgggttcgtcgtgctgcacggcaccgacacgatgtcctacaccgcttcggccctgagcttcctgctcgaaaacctggccaaacccgtcgtcttcaccggcagccagattccgatcggcgtgctgcgcaccgacgggcgcgaaaacctgatgacggccatcgaaatcgcttcggcccgcatcgacggccgccccgccgttcccgaagtgtcgctctatttccagaactgtctgttccgcgccaaccgcacgaccaaacgcagttcggaagacttgagcgccttctggtcgtacaactatccggccctggccgacgtgggcgtcaatatcacctaccacaccgaatacattctccagccggagcgctacgacgaacccctgcacatcgccgcccgcctgagcggaggtatcgccgtcgtcaagctcttccccggcatcgaggaacggaccctgcgcgcgatgctctcggccgaagggctccggggcgtcgtgctcgaaaccttcggcgcaggaaacgccccgaccagcgaatggttcatccgcgtgctcgaagaggcgatcgaccggggactgatcgtcctcaacgtcacgcagtgccggggcggtcgggtcatgatggaactctacgaaacgggactccgcctgcagcggatcggcgtgctctgcggccacgacatgaccaccgaagcggccgtcacaaaattgatgtacgtcctcggactcgaactgccccgcgagcaaacgctcgacctgctccgcacgcccctcaaaggagaatttaccgactaaaacattgtgcgtacgaaaataattttgtatatttcggagctaaaaatcgcatcgacagggtctcggagagaggcacgcagactgtccgaaaaaggataaaacattaccgctcaattcattgcagagaatattactgccgaaaagagaaaccggggcatttttccgaccagacagccggattgtcgaaaaaagctaaaataaaacgaatttgaaccgcgataagccagacaggacaaaaaaaaattacattttttgaaataaaaaacgcaaacgaaaaaacgatcaactaatcaaaattttaattaaacaaccatgaaaaaactttttttgattgtagcagtcgccatcttctcgcttggtactgttaacgctttcgcccaggagacgactacgcctgcaaccgaggagaccgcagtcgttgaagaaaccgtagtggacgaagttccggcttcggacactcagcttgccgaagctaagccgatgcaccaggtgctgatgcagaagttcctcgaaggcggttgggagtggatgcttccggtgctcctctgcttggtattcggtcttgccattgccatcgagcgtatgctttacctgagcctttccaccatcaactccaagaaactgatcgcacaggtcgaagaagcgctgaaaaagggcggtatcgaagctgccaaggaagtttgccgcaacaagcgcggtccggtcgcatcgatcttctatcagggtctggatcgttacaaccagggtttggacagtgtcgagaaagccgtcgtttcctacggttcggtacagaccggccgcatggagtcgggcttgagctggatcggtctgttcatcgcacttagcccgatgctcggatttatgggtaccgtcgtgggtatgatcgaggcgttcgacgccatccaggctgcgggcgatatctctccgacgctggttgccggcggtatcaaggtcgccctgctgaccaccctgctgggtcttatcgctgcggttattcttcagttgttctacaactatatcgtttccaagatcgactcgctcgtaaacgatatggaggattcgtccatcaccctgatggatatcctgacggcttacaagaaataattcgcacttataaagactttattccctattatgaaaaaaatattaaacatattgctgggcgtcatcctgctgattacggtgattctgaccgtatatgcaatggtggccggcggcagcaacgaggcgatcaacctgaacctcatctggagttatatcctgatcgcagtcggtattgcaacagcactgttcacggccgtttggggtatggtcaacagttccaaaggcatcaaaggaacgctgctttcgacacttctgatcatcgtcatcgtcgcggcagcctacctgatcgcccgcggacatacgatcgaaattccggacgtcgcgaacggaggcttcttcccgcatcctgaaaccgttatcacggaagccagcattctggtaacctacgtagctctgggtgccgctgttctgacagctattttcacagagatatacaaagctttcaaatagagtttgaacgatgcctatagataaaagaaaagtacaggagatcaatgccggttcaatggccgacatcgctttcttgctgctcatattcttcctggtggctacgacgatgaacgtcgatacgggtatcgcccgtaacctgccgccgatgccccccgaggatcaaaaggtcgaggatatgaaggtgaagatacgtaaccttctgcccgttctggtgaacggccgcggcgatatcttcgtgggcagggccggcgaacaggagtacgtcgatatccaccagttgaaggaccgggcgaaggacttcctcctcaatgtgatggacgatcccaacctgcccgaaaaagaggtcgaggagttcgagctccccgacggcagcaaatggagctatccggtcggaaaaggcgtactctcgctgcaaacgaccaaagatacccaatatcagatctacatcatggtacagaacgagctgacgcgtgcgatcaacgaaatccgtgacgaagtttcgaagaataaattccaaatgaaattctcggatctcggagaagcggagcgcggtatcgtagccaaagccgttcccatgagtatctcggaagcagaacccagagatttaggaggaaaaaagtagtatggcagtaattaaaaagaaaggcaacaaaagtttgcccccgatctctaccgcctcgctgccggacgtgatcttcatgatcctgttcttcttcatggtatctacgaccatgcgcgatcaggaattacatgtaaaataccaagttccagaagcaaccgaggtgcagaaactggagaagaaatcactcgtaagttacatccacatcggagagccgatcggcgtttggcgggaacagtacggtcctgcaccccgtattcagctcaacgatgccttcaaaaccgctcaggatatcggccagttcgtagctgccgagcgtgacaagctcaatgagtcggagcgtgccttgatgacgatctgtctgaaggccgaccgatatacgactatgggccgtatcacggagatcaagcaggaacttcgccgcgcgaatgccctgaaaatttcctacgcggctgcgaaaaccctgggatactaatttcaggaaggattcattcccgaaggggatgtgtcaaattgagaaatttggcgcatcccctttcaggtatgtaagaacagacatcgaggttcacggcgaagaacgtgtcctgaccgtacataatcgagccgcgataccgataataacgaagcggtttgcctgttatgatacaccgtctttttattcgccggttcggaaagagcctcgggataaaaaacaaaaaaacagaaagatacaggacaaacagggccaagcccacgatcgagcgccaaaaaagaggtcgcaagagcgggaatcggaaaccaagccgaaacagaaaaaacggggcgattaccgacactcctactcctactcctactcctactcctactcctactcctactcctactcctaggggcgaaagatgccccacaccctgcaaccctttttgattttaggggtgcaggttttgacacgacgaggcgaggaccggatgggacatactttatgtatttcccagtcgggatgagcgagaaggggcgaaagatgccccctaaaatcgaaaagagatgaagataatttgcataggacgtaattacgccgaacatgtgaaggagctgcataatacggcaggcggacccgacggacttccgacggaaccggtattttttctgaagcccgatacggcgctgctgcgcaataacgacccattttacatcccctcgttctcgcaggaggtgcactacgaatgcgaattggtcgtgcggatcaaccgggtaggcaagtgcatcgaagagcgtttcgcgcatcgttactacgacgaagtgggactgggcatcgacttcacggcccgcgacctccaacgcgaggcgatcgcccgagggctcccctgggagcgtgccaagggcttcgaccactcggcggccctgtcgcccgaattcatcccgctcgcggagctgggcggcgacgtgcagcggcttcacttcgaactgaccatagacggccaagtccggcagcggggcgacaccgcccgaatgcttttcggcatcgaccggatcatccaccacatttcgcaatacatcacgctgaaaatcggcgacctgatctacacgggcacccccgccggcgtaggtcccgtgcatccgggcgacaacctgaaagcctcgctcgaaggacacatgctgctcgatttcgatattcgctaaccgtttttcacgccatgaaaccgcaattgctacttccccttctgctggcagctctcctgccgatgaccgcctccgcccaaagcggagagggagaatttcccgatcttttcaacacctcggcggcatacgacatactcgccgtttttccgcaggcggacaaactcgccgaagacccgtttttcaccggcacactgggagcggacacgctgttcctcgaccgggcgcaccggatcgattcggtcgtccgtccttcgcaactctgcaacctttacagtttgagcggaggcagcaaagacgatccggaacaagtcgtcgaattcttcgcctcgttcgaccccgaatcgctcccgcaaaaggtgcggggtgcttggatcgacgaaatatgcagcgtccgcgacgaactctcttactgcctgcaacggctcgcacaagcgggttacgcacaatattggcaggagcaggtgcggccctgcctgaacaacgcgatcgaacagtaccggatcgccccggaacaactgggcgccatccatcaggaaatcacccgtctggccggcgggcagcctctggacgctacgggttcccgaatctacatcctcggcaacatagacaacgctttcgccctgctggacgaaacattctgctgtacgcctctgctgctcgatcccgaaacggcccgccaataccgtatcgacttcatgcaggtctatattcacgaaaacctgcaccggctctcgctttcgggcgaactgctcgacatgttgcagacgctctacgacaacgacgacttctaccgcacgcacgaagaccgggcacgcgcctacggcgaaggcggcaacgaggcattcgtcgtagcggccgaacggtatgtatcccgccgcctggggcgcatcgacgacaagcaggtattggacgaatttctcgtttattgcgacggcacgcacgtattggcgccaatcgtttaccgctatctgcccgacctgcgggacggagagtccttcgacggctttctccgtcggctgctcgaccgccgcatccggccgggcaaagtcgaaagccaataccgccgggctatgaaaaaactcgccggaacccggaaatccgaaacaacggcaacggaaacccggtcctgaacccaaaacccgtaacgccatgctgctgcacgacaaactcaaaccctaccgcctgatcctggcctcgcaatcaccgcgacgacagcaactgctcgccgagagcgggctgccgtacgaaccggccccccggtacgactgccaggaggtctatcccgcgacgctggccgcgacgcaggtgccccgctacctctcgcaactcaagagccgtgcttatccccggccgctcgcggaaaacgaaatcctgctgacggcagacaccgtcgttatcctgaacggcgaggtgttgggcaagcccgaagaccgcgaagatgcgatccggatgctcgaacggctctcgggccatcgtcacacggtggtcacgggcgtcacgctccgcacggcccgccggcgccggagcttctccgtacgcagcaatgtctggttccgggctctaacccgcgaggagatcgtctattacgtggacaacttccatccgctggacaaggccggcagctacggcattcaggagtggatcggctatgccgccatcgagcgcatcgacggctcgttcttcaacgtcatggggctgccgatccaacgcgtctataccgaactcaatcaattcattcaatcaataaaaaacaatccatgaaacgtatcttttcgactctctgcctcgcgctgctttcgctcacggcactcgccgatgagggcatgtggctgccgagcctgatctcgtcgcgcatcgacgatatgcgcgccaaaggattccaactgactgcggaagacatttacagcatcaacaaggcttcgctcaaagacgccgtcatgctcttcgacgacggctgcacggccgagctcatctccccggaaggattgctgattaccaaccaccactgcggctacggagcgatccagcgcctgtcgtccgtcgagcacgactatctgaccgacggcttctgggcacagtcgcgcgaagaggaacttcccaacgaaaacctcaacgtcaagttcctcaaacgcatggaggacatcaccgagcgtctggccgccggcgagagccgcgaggaaatcctcgaaaaagcccgcgagaacggccgctacaaagcctcgatcgagcagatgtactacggcaaccaacagttcctgttcgtctacgagcagttcgacgatgtccgcctggtaggtactccgccctcgtcgatcggcaagttcggcggcgacaccgacaactgggcatggccccggcacacgggcgacttctcgatgttccgcatctatgcggataaagacaaccggcctgcggcctactcgcccgacaacgtaccctaccgctcgaaaaaacatttcaagatctccaccgaaggtattcaggaaggcgacttcacgatgatctacggcttcccgggcaacacccaggagtacatcctctccgacgcggtcgattacatcgtgcaccgcagcgacccgatgaaaatccgtatccgcaccgaacggctcgatcggatcaatgcggcgcaggagaaagatcccgccatgcgcatcatgtacgcggcgatcaacgccggcatctcgaacgcctggaaaaaatggcagggcgaagcgctgggtctgacgcgtctgaacactgtggcgagcaaacaggagtacgaacgggccttccaagcctgggcccaggacaagcccgaataccgcgacgtgctcaaagagctcaaggcggagtacgcccgcatcttcgacgcctacttcgcactcgaactgatgagcgaaaccatccgaaccggcgagctcaaccggatttacaaccggccctcgttcggcgacgaaatctatccccaggtgaaggcgctcaaccgcgaccttttccgcgtgctgtaccgcgaatattacgacaactgcccgcaagagtacatggtaccgctcttcgccgccgaagtagagcgtctgggatcgcccgaagcatacgccgagctgatgttcgaagccacgcacaaggaggacgaatcgaccgaggctcccgaactggaagctctgcgggccgatattcggacgacggtcacccgcattttcgatgaactgggcaagtgctcgacccgcaacctgaacagcgagcgcctgaacgaactctacacgacctatatcaagggtctgcgcgaatgggatacggagcgtgccttctatcccgatgccaacctcacgctgcgcgtggcttacggcaaggtaggcggctaccggtatgccgacggagtatatcacaagccctacaccactgtcgaaggtattttggaaaaggacaatccggaaatttacgactacaacatcccgcagcggctccgcgacatcatcgccgccaaggactacggacgctggggcgtggagatcgacggccgcacgaccgttcccgtctgcttccttgcggacaaccataccacaggcggcaactccggctcgccggtactcaacggccggggcgagctgatcggcgtgaatttcgaccgcacgtggctctcgaccatgagcgacatcgccttcgacccggctttctgccgcaacatcgcgctcgacatccgctacgtgcttttcgtaatcgaccgcatcggagacgcttcctacctcttcgaagagatggacttcgccgaataaaccgttttccgaagcaaccgtgccgcacgctgccgggaccgccgcacgcttcgaaaacaacgtcgaattgccgggtcagtttcgtgacccggcaatttttttgccgtatattttgggaaaaacaaaatagtcactatatttgcacacctgaaaacccgctgcggcgggaatcgaggcccaggtggtggaattggtagacacgccactttgagggggtggtgggcattagcccgtgtgagttcgagtctcgtcctgggcacaacaaaccggtttagaataatttctaaaccggttttatttttcctgatcgtgattgcatacttcatgaccgcttgggacgctatgcaccccaagcccccctccgagaagagaacgcagggaaagtgcagaattataaacgtagccgcaggccgcgaataagcgaccgtcggattcgatctgtctcgcaacgacatttagaggaaaacatccttttccctgatcgtaatccggttattcttcctcgtcttctttttcggcccagcgttcgagtatctgacgcacggcttcgtcgtggtctccgttggtgatacgataagtccagcaaacgctgtttccgtccaccttttcggatacccactgcaattggtcgcgcggcgtaccgcgttgcaattcggtcatagggtcgaagaaagaatacatagcacacgtgtcatctctataactaactaaacgataattacggtctggatcttctgttttcatcaattcttccatcgacatattcgcatccacgaactccggcttttctggttccggctccggcgtgggctgttcttccggcggagtttccggtgccggactttctgccttgtcggaacagcccagcggagccaagaacaggagcaaggctcctactgataaatagacacgtactttcataatcgaatttatttaatttaataagttgattccgatcccgcccaaaagactcttacaaactcaccgcaacccgatagcattccggccagaacttctccaccgaagctcaacgatataaggatatggaaaaaatttcgctttcccaaccgctttttcccgacaaaatcccccccccgaaaaacgcctccggaaggccctgtaagggcgaaaataaattcgaaaaaatttccgtatggcagattaattgcacgtaaaccggacgatcggacctatattaacctaccgcttccatgaaaaaagaaaagaaaataatctggctcctgacgggcatcgccgccgtgtcgctcctcgtactctgcaccgtagtgatagtccgcaccgcgacctatcccttcatccgcaccaccggtccggacgggcctccccggagcgtcgaaccgtccgcccaggccgtcgaacgattggccggcggaatccggattccgaccgtaagcgatgcgatcgaccggacggacgacaatccgttccaagccttcaaagcctatctgccgcaggcatatcccgcgatttacagtcagttggatactctgacgatcaacgaatacgggcttgtattccgctggcccggcaagaacccggccctgcccccgatcctgctctgttcccactacgacgtggttcccgtgctcaattacgacccgtcggctcccgatgcaccccttccgggctgggactacccacccttctccggcgccgtagccgacggacggatctacgggcgcggcacgctcgacatgaaaggcatgctgttctcgatcctcgaagcgaccgactcgctgcttgcggagggattccgcccggagcgggacgtgtggatcgccctcggattcgacgaggaaaccggcggcacgcagggtgccctgaagatcgcccgctatttcgaagaacagggcatcgctttcgacgccgtctatgacgaaggcggcatcatcatcgcccccgggctgggaggaatccaacgtacggctgccctcgtaggaacggccgaaaagggattcagcacgatccgaatcacggtccggggcaccggaggtcactcctcgatgccgccggagaagggatcgctcgtactggcggccgagatcatcgagatgctcaaccaagaacgaatgcccgccttcctgacagctccggtcatagctttcctcgatcggatcggcggctcgatgggagtcgcccagcgcaccgcgatcgctaaccgctggctgctggagagtccgctgctccgctcgttcgaaagcaacccggccaccaatgccctggtacgcaccaccaccgccatcaccatggcccggggcagcgacgcggccaacgtactggcttcggaagccgaagtcacggtcaatttccgcctgctgccgggcaacacgacggcccaggtgaagcggcatgtcgaaaatatctgcaacggatacgacgtccggatcgaggaactctcgacccgcgaaccgtcgcaaatctccccggacgatgtccacgccttcgaaatgatccgcacctcgctcgccggactctacccgggtacgatcgtaacgccctacctgacgctcggcggcacggacgcctacaaatacgaggcggtgagtccgaacgtatatcgtttcatgccggtcctccttaccgaacaggaacagggtacgatccacaacgaaaacgaatcgatctcgctcgagaactacggacgaatgatcgcctatttccgcgacctgatccgaaattaccggtaacgggagcggatccgtcatcgcagcgacagcaacaataacttttagttatacgacataactttttccccgttgtttcaaggggataaagcctgtatatttgcagcatcgtttacaaaaagttattagcaccgtatgaaaccgctgcaactcacgaaatccatgcaatccgcaaagctcaactggcgccaaatcctttttgccggactgctcataggttcgctcttctgttcgcccgtcgtcacgctcttcgcgggcattctcttcgccctgaccctcggcaatccgtttccggtctggagcaagaaggcttcgaaaaaattgctgcaatactgcgtcgtcggactgggattcggcatgaacttccacgaatcgctggccgccgggcgcgaaggcatgaccttcacggtggtttcggtagtcacggtaatgatcgtcggcgtagtgctgggacgcctgctgcgcatcgaccgcaaaaacagctacctgatctcgtcgggcacggcgatctgcggcggcagcgccatcgcggcggtcgcacccgttatcgatgccgacgagaaccaaacttcgctgtcactggccacgatcttcatcctcaacgccgtcgccctcttcgtattccccgtcatcgggcattggctcggcatggggcagacccagttcggaacctgggccgcgatcgccatccacgacaccagttcggtcgtcggcgccggtgccacctacggcgaggaggcgctcaaggtagccacgaccgtcaaactcacccgcgccctgtggatcatccccctgtcgctggtgtcggccctgatcttccgtcagaaaggcaagaagatccagatcccctggttcatcttctggttcgtcgttgccatgctcgtaaacacctactgcaacctgccgacccagctcacgcacggcatttcggtcgccgcacgctgcggactttcggccacgctgttcctgatcggcggagggctctccatagaggtaatccgcaaggtaggcctcaagccgctggtgctgggcatcatcctctgggccgtcatctcggtcgcatcgctcgccgtgatcttgctcttgtaggcagcatccgatcaccataaaacagcccgaagactttcgatcttcgggctgtttccattattacctgattatattctaaaggtattactccttctttccatgacaggaataacgaaggaccggatcgcggacgaagcgttcgaaactgcggcactcctcgtcagtcatagccttcggatagctcatcagcaccaactggtgcggctcatagggacgctggaacgacggatgtacataatgataatcgttgcgcacgaaccccagccgctcgtaaaatcgaaggcggcgaacggcgatttccgtctccggcggatcgatttccagcacgatgcgtccggccttccggcaaaaagcctccaatacccggctgcccatattggcaccgcgcaggtcgggcgaaatggccaaatgctcgatatagacatattccggagccgtccagtaataaagaatgcctatcaaccggccgtccgaccagatgccgtcggccgtatagtgcggatcggaaagagcttgcagatggtcttccagcgaacggatctccttctgggggaaagagttctgatagatcgcccacgcctcgtcccaacccgggtcggcaggcgatcggaaaggtctgaatttcaaatcggtttccatagataaaacgtgattacatactttagcatacctcctcggagatgcagtgttccgaatcccctccgagtaaggaatttagggcggagcaacattacagacacagaccacggataaacgaccaatggtttccgatgacaggccaccgcattctcgagtacccgaacggatccggcggcgatcccacagccgaaaacggcctgcaaaatatcgcagaagcgccgcgaaggatcaggccgtatggcgggcgaactccacgaaacgtgcggccaaggcatcgctgcgtccttcgggccagcagaacgaaaactcccgccggatcgtacagccctcgatgtcgatgatgcggagctcgccgctgcgcagctcatcgacgatcgacgccaccgacacgatggccatggcgtcgctgttgcgcacgaaactcttgatgctctcggtactgcccagttgcatcactacacgcaacgaagcgagtcgtacatccgccgccgcgaggtatttcgaaatcacttcgagggttcccgaaccgctttcgcgcaacaccaggggcaccgtctgcaactccgcgagcgtaacctggtcgcagcggccgtaccagcctttcgtggaagcgatcagcaccagttcgtcgggaataaacggttcgtaatggaaccccggatgccgggcgctgctttcgaccagccccaaatcggtatcgtgacgtgcgagggccgcctcgacctgctcgctgttgcccgacgcgagcgaaaccttcacctcgggaaaccgggccgtaaaacgggccagcacctgcggcagaacatactgggcgatggtcgtactggctcccaccttcagttcgccgcccagccggtcggtgaaaagatccatctcgtactgcagacggcggtagccgtcggcaatgcgttcggcatgctccagcatgacacgcccggcttcggtcagcgccagacggctgccgctgcgctcgaaaagctgtaccttatagcgggattcgagttcgccgatatgcttgctcacagcgggctgcgaaatgtaaagctgctcggcgcatttggtgaaattgagggttttggccgccgtaatgaaaacccgcaagcggaaatcgtccatagcgacctaatccaaaccgccctgggcggcaaactcggctacggatcgtttgaaatgctcgatggtttcccgcatcgtcataaaagacttgcctccggccgcattgcgatggccgccgccgttgaaatacttgcgggcgaaaagatccacgtccaccccgccccgcgaacgaagcgacacccggataaacttatgcgtggcaacgaagatcgccgacagcttcatcgacttgatcgtcaggggataattcacgaacccctcgctgtcgccgggctggaactgaaaccggcgcatctcgctctccagaagcgacatataagcgaccgtaccgttgtggatcacctccatcttgcggttgatcgcatagccgaacagccgggcacggccctcggtgaaggcgttatagacattgttgtggatcgtgggaatgtcgatgcccgtttcgaccagcaccgcaacggcccggtacaactccggcgtaaggaacgaaaacgagaagttccccgtatcggtcatcatacccacgtataacgactcggccatactccgcgtaatcgcctgcgtgcccagcatcttttcgaggatccgatagatcaggaaagaggtgctcgacgaaccggtacaggaaaacatcagatcgaaaccgggtcccggcgacagatggtggtcgatcaggattcgcctggccgtcgtattggattcgatcacctcgctcaacccctccagacgggatacggcgttgaagtccaggaaaaagatcaggtccgactcctccaccgcacggcgggcgactcccgcttcgtccgtcttgaaaagcaccaggttctcgatacccgtcatccagtccaaaaaataggggtatttgttgggcacgatacaagtgacgcgatgccccatctccagcaacgcctcgcgccacgccagcgaagagcccacggcatccccgtcgggattcgtgtgcgacacgatcacgatattctgcgcaggccgggcaagcaattcgcgcagccgttctatatcttcttgagaaaccattattgatgcaaagatacgattttatccgttaaatatcaaatccgcacccgttccggggcgtttctccgttccgaaaccgatcgtggagcggatgttcaatctttccggacagcgtccggcggcagcaggatcataccctccggccggcaggatatttcgggcaaagagaggccttcgaccaaccgcacgcccggtctcctctgcgctgcggactcggaagagcggacggattgcccggtgatgctcgtcaccgcatactcgagacaggggtcgtccaaactgccgaactcctcgtatccgttgttccaatctcccttcaaagcatccggcgcaagaccgttcgggtccaccgtttcgagccgggcgttatatccctggaaagagaccggcatgaagaggtattcgtacgctccatcctccagatagacaccctccatccccacatttttgccgttggtcttctgcccgaccagcaccacttcgagtccgattccccgcaaagcattgacaacggcttcgctcgccgaagccgtaccggaagagacgatgacatacagccgaggaagatccagcgcatacccacgcaggtcggctccccggtaatcgccgtagatgaactcctcgtaaaaacgctctttcgactcgtcgtaagcctgcccggtctccgccgccgtcatttcagggtattccattcgcgcatcgttataacggtaatactggaacacctgcccttcgcaccgagcaccggcgatgcaggaggcgagcatccgggaagacatcacatatcctccaccgttcaggcgcaggtcgaggatcaagtcgttgatgcccgcatccttgaacgcttgtagcgcatccagcaattcgccgtcgaaagccgcatcgaaactggcgtacaccaagtagccgatcttgtgctccccgtattcgagcacgtcgcggtacagcaccggattttcgtatatcaactccgccgtcagcttatgctccgacacgccgaaaccgccctgattatccgccacggagagcgtcgcggcgccgttcggtgcgagcagtttggaatagaccgtattcaagttcccggcagtgatccactgtccatcgacctggttgatgatcgttccgcgcccgagacccgccctcgccatcggagagtcggggtacacggccataacggcaaaaccgtactgccccgtttccgcaccgccattatcggtatatgagataatcgccagagaaacgatgccgaacccgtaaacgggctccttcgggaactgactgtcgatatccgcagacaaggctacccggctcaccggagagaggcgctggatgttggaatagagctgccaccttccgttacggaatttcttgtccaggtcgttggttttcatacgcatgagcacgtcgccgagaaactcgtcgtaaggcaggccgaaatcgggcgaaagagtcgcatactcctcgttccacaagtagttgcgccgcaggatcccgtccatatcgtgattcacctccggctccccgttgtaaccgccgcctccgccgccggtcgcatccttggtacacgagacggccgcaactactgcggcaaacactccgcaagcgagaatcgcatggtaaaatctcttcataatcattcggttttagatcgtttattgtcttcggcatatttgcggcaccaggtcgaaaccccgcactcggcgcatttcggcgcccgggccgtgcagacatagcgtccgtgcagaatcagccagtggtgagccgtcggcagcaggtgggaagggatgtatttttcgagggtcagctcggtctgcaggggcgttttcgaccggttcgtgagtccgatacggttcgaaacccgaaatacgtgggtatcgacgggcatcacctccttctgccagatcacggcgcccacgacattggccgtcttgcgtcccacgccgggcagacgttgcagctccttcagatcgctcggtacttcgccgccgaactcctcgcagagcatgcgggccatgcccgccaggtttttcgccttgttgttgggataggagatgctcttgatgtagggatagatctgctcgggagtcgcggcagccatagcctgcggtgtagggaaagcctcgaacagggccggcgtagtcatattgacccgcttgtccgtgcactgggccgacaggatcacggccaccagcaactcatacggcgagccgtacgcaagctcgctctcggcgacgggcatgtgctcctcgaaccacgcgatcacccccgcataacgctccttcaaagtcattgtcttcctgttttaagccggaatccttccggcggatttcctataatttggtcagtttggcgaatttggccagcagggttttctccccgtatccggaaaattcgaccaccagcttgtgatccgacgccagggtttcgatgcggcggatgacccccgcgccgaacttcaggtgcgacacccggtcgccgaccgcataatcgccgcacgatacgggcgcagctccctcgaccagcgacgactcgccctgacggacacccacgctgcgcatcccggccgtcgaacgggtcggctggacaacaacgggacgctgcgcctccgattttaccccggcggacgaacctccgccgaaacgcgccccggcctgcgaaccacccgccgcaggcttctgctggtagcggtagtcgaaacggcggcgcagctcgtcgagcgccgaggagccctctccccgcccggccgagcggcggacgggttcccgctcctcctgcatcgcatccgtttccaggtaacggctgtcgatctcgcgcagaaagcagctcggacgcgagaactccatattgccccacttgaaacgcatctcggcataggagagcgtagccaactccttggcccgggtcagcgccacgtaaaagagccgccgctcctcctcgaaaccgtcgggcgactccacggcccgctgcgacgggaagaggttctcttccaatccgacgatatacacgaatttgtattccagccctttggccgaatgtacggtcatcaacgtcaccttgttgcggtcctggggatcatccttgtccatatcggtcatcagcatcaccccctgcagccactcctcgatcgtagcccgctcctcttgctgacgttccccggcccggatctcggcctcgcgctgctcgttgaagagctgcatcgagttgagcagctcctcgatattgtccagcgcactggtcgcctcaggggtgttctcggcccggtaagcgccgatgatacccgaacgggtcgcaatttcgagtcccaggtcgtacagccccttttcggcccgggccaacgacagcccccggacgagggccacgaactcggccactttgcggacgatggtcttctgcacgggatccgtcaccggctcggccgtcagcgcatccaccgcttcccacatcgacagattacgagctttggccagcaaagcgatccgctctacggtcgtatcgccgataccccgggcagggtaattgacgatccgcttgaaggcctcgtcgtcgcgggggttgataaccagccggatataggccagcagatccttgatctccttgtggtcgtagaacgaattgcccttgtaaatacgataaggtattcctttgcggcgcagcgcgtcttcgagcgcctgggactggttgttggtgcggtacagaatcgctgcctcggcccactcatcgcccgcagcccgcaccttgtcgcgcaggtcgctgaccaccatttcggcctcctcgcggtcggtataggctcggagcacgcggatcttttcgcccatatccccttccgaaaagcacttcttctccatgcgtttcgaattgcgttcgatcaccgaattggccgcctcgacgatcgtgcgcgtcgagcggtaattctgctccagcttgaagatcatcgcgttggggaaatccttcttgaacgaaaggatgttctcgatcttggccccccggaacgaatagatcgactgggcgtcgtcgcccaccacgcagaccttcgaatggagctgcgacaggcgccggatgatgacgtactgggcatagttggtatcctggtactcatcgaccaggatgtatttgaactgctcctggtaacgggccgtcacgtcgggacagtcccgcagcaggatgttggtctgcaacagcaggtcgtcgaaatccatcgccccgttccgcttgcagcgggcgcaatagatgttgtagatgttgccgaactcgggaatctgcatccgccggtcttcggctgcggcacccgcattggccaggtaagcgcccggcgtcaccaggcagttcttggcgtaggagatgcgcgaggcgagcatcgcaggtttatacttggtatcgtccaggttcaactccttgacgatggttttcagaaggttcttgcagtccgacggctcgtaaatcgtaaaactctgagggaagccgatccgttcggcgttgtcgcgcagaatgcgcgaaaaaaccgagtggaaggttcccatgcggatatagcggtgccgtccgtccggcagcatctgggcgatgcgttcgcgcatctgctcggcggccttgttggtgaaggtgagggcgagaatgttgtacggagccaccccctgctcgatcatataggcgatgcgcgaagtaagaacgcgcgtcttgcccgacccggcgcccgcaatgatgagcgacggcgaatcgtagttcaccaccgcatcccgctgggcctgattcaggcctttcaatatttgagattccataacgtgcaaatatagcgatttcccggcaacgacggagcgtccgcagccgaataatacgacggagcgccgcaaccgaaggcgaacctgcgggaccccctccgcccgatcttcgccccgaagcggcgcccgggtacggtttttcaaccggggcaccgccccgcatcagggcgaaaagagcggtcgggattttcgattttcgaaaaaaatacatattttgcaataattttgtagggtatgcgttgcataaataccgaaaacaacgaaaaatcgaaaatacacaccgaaaaatgagtgaagtcatcaacatcaaggaactcaacgaacggatcgaacgcgaaagcgtcttcgtcgatacgctgcgcagcgaaatgggcaaggtgattatcggacagaatcacctgatcgacaccctgctgatcggcctgctctccaacgggcacatcctgttggaaggcgtgccggggctggccaaaacgctggccatcaccacgctggccaaggcggtcgatgccgatttctcgcgcattcagttcacccccgacctgctgccggccgacctgatcggtacgctgatctactcgcagaagaaggaggagttcctcgtccgcaaaggccccgtattcgccaacttcgtcctcgcggacgagatcaaccgctcgccggccaaggtgcagtcggctctgctcgaagccatgcaggagcggcaggtgaccatcggcgacgaaacctatccgctgcccgagcccttcctggtgctggcgacgcagaacccgctggagcaagaaggtacttacccgctgcccgaggcgcaggtcgatcgtttcatgctgaaagccaagatctcctacccccagaaacaggaggagcgcgacattatgcgtatgaatctggccggggaaggactcccgaaggtcaataaagtgacttcgcccgaagacatcgtcaaggcccgccgcgtagtcgaagaggtctatatggacgaaaagatcgaaaaatacatcatcgacatcatcttcgctacccgcgaaccggccgaatacaacctcgaaaaactgcagcccctgatcgcttacggcggctcgccccgtgcgtcgatctcgctggccaaggctgcccgggcctacgccttcatccgccgccggggttacgtgattccggaggacgtgcgggccgtctgccacgacgtactgtgtcaccgcatcggactcacctacgaagccgaggccgagaacatcaccacagagcagatcatcaccgacatcctgaacaacgtaatcgtaccctaattgaaaatgcaataatgcaggagaccgaaaacgatatcctgaaacgagtccgcaagatcgagatcaaaacccgggggctttccaacgaaatcttcgccggaaagtatcacacggccttccggggacgcggcatgtcgttttccgaagtgcgcgaataccgcgccggcgacgacgtgcgcgacatcgactggaacgtcacggcccgctcgcgcacgccccacatcaaggtctacgaagaggagcgcgagctgacgatgatgctcctggtggatgtcagcggctcccggatgttcggcaccacggaccgcctgaagaaaaacctgcaaaccgaaatcgccgccgtgctggccttctcggcctcggagaacaacgacaaggtgggctgcatcttcttctccgaccggatcgagaaattcatccccccgaaaaaggggcgcagccatatcctggccatcatccgcgaactggtcggcttcgagccgcaatcgcgggggacccgtatttcggaagcgctgcgtttcctgaccaacgtcaccaaaaaacactgcacggccttcctgctctcggactttctcgatcccggcaaggaccgtacggcgctcgaggacgcgctcaagatcgcttccggaaaacacgacctggtgggaatccgcgtcagcgacccccgcgaagccgaactgcccgacgtagggatcgtcgaaatgaaagacgccgaaacgggccgaaaagcgtgggtggacacctcctcggcccgggtgcgggagcactacgcccgcgtctggcaggagcggagcgccgccatcctctcggcgctcaaacaccaccgcatcgacacggccgaggtatcgaccgacggggattacgtcgtggaactcatcaaactattcaaacagcgatgaagtcgatcccaaataacccggcatcaacctgctctccgttcgcacgcaacggcggtattcaaccgtccgccgccgcagagcggcaaaatgccgcgcaaacacctccttcggaagcggtgcccgtcggcctgcggtcttcgggtcgtccgaaagccggtcggacatccatcacgaaaagagtaaaaacagctctggcgacagctcttctgacggggctgacgaccgttctgtacgccgcaccgccgacgatcaccgcccgcgtcgaacccgacagcatcggaatcggcgaccgcttcgacgtggtgatcgacgtcgatcgtgatttggtgcaggtcgtggaatttcccaccttcaacccgcctccgcagagcggactggaggtcgtcgaatcgcatccggtggacaccctccggcgcgacggacgtcacctgagcctgcgcaaacgctacacgctggcggcgttcgaggagggcaacctcggcctgggacgcgcacaagtgctctatctggacaagaacatcaccgacacgctctataccgccgacaccctgcggctgcaggtgggaacctttcagatcgactccacgtcgcacacgatctacgacatcaaagcccagcgcacgctgcccttccgctacggcgaaatcagcggctacgtcctctggagcctgctgggtttgatcgtcctgggcggcgcgatctacgcaggccgccgcctgatggcccgctacgcccgcaaggtacgcgacatcttccgtcccgcaccgcccctgccgccccacatcgcggccatccaagcgctcgaaacgctccacaaccagaaactctggcagagcggacgccacaaacagtattactcgggcctgacggacatcctgcgcacttatctggccggacgatacggcttcggcgcgatggagatgacctctgacgaaattctcgcggcagtccgccgttacgacctgccgcagaaatgcgtcatggacctgcaggcgatcctccgggacgccgacctggcgaaattcgccaaagcccagtccgaagggacgaccaacgaagacaactacctgaacgcctactatttcgtcgaggagaccaagcctgcggaaatcgcggaggagggcaccgaacaggacgacacccaatagcatccgacacgccatgccaaacagaatcctactgatattcatcaccctgttgctcggaatcggcagcgcctcggcccagaaataccccgagcgcagcctcgtgcgcaagggcaaccgggatttcgcgaaggagcggtacgaccgcagcatcgaacgctacacgcaggcgctcgaagcggcccccgaaaacttcgaggccgcctacaacctggggggcgccctctaccgtaccgaaaaatacgaggaggcggccaagatgctcgaacgcatcgccgcagactccacccgcaccgaccaggaacgggccgaggctttctacaacctcggcaacgcccaattcaaacaggaaaaatacccggaagcgctcgaaagctacaagaactccctgcggatgaatcctgccgaccaggaggccaagtacaactacgcctacaccaagcgactgctgcaaaaacagcagaacgaggatcaaaacaaagatcagaacaaggaccagcagaacagcggcggtcaggatcagaatcaagacaaaaacaaggataataattcggacaaagaccggcagcaggacaagggcggcgagcaacaggatcaacaagaccggcagaacggtcagaatgatcccgacaagaacggacaaaatcccgacgaacagccgcaggattccgacaagccggacagcgacgaccggcagcccggccaaccccgcgaaaacggcatctccccggaagaacaggaacggatgctggatgcgatccagacccaggaggacaagacccaggagaaactcaaggagaaagccggggtcgtggtacgcggcaataaaaactggtaacgaatcaattctgaaacggctatgcaattcgcctctccatactttttgtggctgctcgcggtcattccgctcatggtggtctattacgtctggcggacccgtcagggcggcgcttcgatccaagtatcgaccatcgacggtgtcgccgaagcaccgcgcaccgtacgttattacctgcggcatctgcctttcgcgctgcgctgcgcggccgtcgcgctcctcatcgtagcgctggcccgcccccaatcggtcgatgaaggctcgacgagcaacaccgaaggcatcgacatcgtgctggcgatcgatatttcgacctcgatgctggcccaggacctccagcccgaccgcatccaggcagccaagcaggtcgccggcaacttcatcaccgaccgccccggagaccgcatcggactggtggccttcgcgggcgaagccttcacccaaagcccgctgacgaccgatcagggaacgctgcaaaccctgctgggacgcctgcgcagcggcgtggtggaggacggcacggccatcggcaacggactggcgacggcaatcaaccgcctgcgcgagagcaacgccaagagcaaggtcatcatcctgctgaccgacggagagaacaaccggggcgaaatcgctcccctcacggctgcggagatcgcccgtgaccagggcatccgcgtctatacgatcggtgtcggcacacgcggcacggccccctatccgacggtggacttcttcgggaacccgaccgtcgtgcaggccaaggtgcagatcgacgaaaagatactcggcgagatcgccgatctcacgggcggccgttacttccgcgccacggacaacgccaaactacagtccatctacgacgaaatcaaccagctcgaaaagagcaaggtcgaaatatcgcaatacaccacctacaccgaggagtacctccgctgggcagcggcggctctggccctgctgctcgtggaatttctgttgcgtaccctctggttaaaatccctgccgtaatgttcagattcgcatatcccgaatacctctggctgctgtggctcctcccgttgctcgtcgccgtatggacggccgccggacagctcgcacgccggcgcctcagccgtttcggccggctcgaaaccatccgtccgctcatgcccgacgcttctacggggcgccggcgtctgaaattcatcctgtacctcacggcattcgccctgctcaccctggcgctcgcacggccgcagctgggttcgaaactccgcgaggtggagagccggggtatcgagatgatgctcgtggtcgatgtttcgaactcgatgctcgccgaggatttccagcccaaccgcctcgaacgcaccaaatacgccatcgacaagctcttcgacggactcaagcaggatcgcgtgggactggtcgtcttcgcgggcgacgccgtagtgcaactgccgatcacctcggactaccgcatggccaaagcctttgcccgcagaatatccccttcgatggtttcggtgcagggcaccgacatcggtcaggccctctcgctggccaccatgtccttttcggaaaagggagataaccccgcaggacgcgtcatcgtgctcatcaccgacggcgaagggcacgactccggcgccatcgaagcggccgaacgggccgccgaacagggcatccgcatcttcaccatcggcatcggcacgccggaaggcgctccgatccagatcggcggcgagttcatcaaggacgacaagggagagatggtcgtatcgaaactgggcgaacccctgctcgaaaagatcgcacaggcgaccgacggagcctacatccgctcgaccaaccagtcgatcgggctggacgaaatcgtacgcacgatcaacaatatggaaaaaggcgacctggcggccctccgcttcgaggagttcaacgaacagttccaatacctgatcggagcggccctcgtcctgctcttgctggagttcctgctgctcgaccgccgcaacccgctgctccggcgtttcaacattttcggtacggacaccgaaaaataaaaaacagcgattcacctctgacgccgaatcgccgggccttttgcaggttccggcgactcggcgttagagaaacaacggggcgtatcaccccgcgatcggatggctctgcgctatctcccaatgattagcggccaacagcaccatcatcacggcaacgaaaagcaacaaccagtccacctcccggttgcggtatattcgggccaggaacaaccccaaggtcccgagtgcaagcaaaccgtcaccacacatcgctacccaaaccgatacttcccaagagatgacctgggaaacaagcagctcgattccgatcacaaccgccaaagcccacagcagcctctcggaagtgaatatccgcccgggaaccggatcgcatcgcacgatccgacagcggtctcccagaaaatgtctccaattcgaatctctattttgcatacttcacacaaatatcaaaagttcgggcagcaccatccatgcaactcttcaaagcaacggtatttccaacgagggataccgcagcagccggtgcagcgcttcctccggataagaccgaaacggcagtcaccacagccatagttatatgataatcccttttacagcgttttatatcactattatattgatcgtaacattgatcaactccccctcggctttcaaattccaccaaagaattttgtaccaatggataaacaacagctattgcaacctgttcattcggcaacaaaatagtgtttgcaagaatttgatttaaatcatcatcaaattcttcatcaaccagccaacgataaataatttggtaaaaaccagaagtagcattttcttcaatccaattcaaataatcataaaaatctggttcataatcagaacgagtataaatatctccacaataatcaaaattattttgaaaatcatatcgagtagacaactcttttaaccaattatctaaaattacagcatcttcttcagacagataccctccaacttttgattgagacaatacaaaatcacttaagcgaccaacctcctgcaaaaaattatctttcttttctgtaccattttggacatctgcaacttgacatgatgataatatcaaaatagatatcaaatacatatattttctcatagaatcaatctttatatataaaacatattaaatgaatatgtataaatcctattattttatgccattcaccgcttgattaactacttatattatctatggtatcagatgatggcaagtcactattgacaccgttacgataatcattattcagaacttttactatacttataaataaacttcgcatttttcgtcctaatagcggtgacccgacatatacaacctcgttatttgaatccaacaaaaaggcattatattccttatttataggtaaaagattattttcttcaaactccccctccttatcgcataatacaggaaatataaaatgctctgaatttaaactatgaaaaaacaaagagtcgtatctattcgccttaataataaagactatttcaagtgagggtcccactaattctacactatctattattttcccccaatgatgcaagccttttaatgaacatggcgcacatgttccactactataatatacaacaagtttaggtgctaaattttctatgtttattaccgtatcacgaccttctattttccatgtcgcatgaccaggtaaaataagattttggccataaatatctcttaaattttttgtttttctatttttcaaatcacatgaaaaaccaacaaaaagcaataaaaatacaactaatatattccttatcatcttccaatctacttgatttatacaaaataacccaatacaattataataattttcacataaacaaacaataaatacattattttttattataaaataattacaatctgaaggaaaacctctttcccgcacgacaagccgcaacctgcaccaaatcggatagccttgtcgccggcagccgatcaaaagcggcagacgtattccctgcaaaattttcccttgtcccgactgcgtcccgaatattttcgcgtgataaaacatgaataaatttacttttatccccgacttattcatacctttgccccgcaggtccgctccatcgccgcctggcaacagggggaggaaagtccgggcaacgcagagcgccacgcaagctaacggcttgatatccgtgagggtatagcaagtgtaacagaaaataaccgccccgcaggggtaagggtgaaaaggcggggtaagagcccaccgcgaaggtagcgatacgcttcggacagtacatctcgtgggttgcaagaccatgtataccggcaatcaagggttgctcgtccaatgccggggggtaggttgcttgaggcgccgggagaccggcgtcctagataaatgatggggactccgggcaaccggagcacagaacccggcttacagggcctgcaaaatcgaaaggctgcccgtcaatgggcagcctttttcgcaatcactctcccgcgacaatcctccacgataaaaaagatacgcaagccgccatactcgtccgggggcgcactcggctttcaccgcaacggcccgacgatgcgcggccgggcactcgactgctgccgcaaccggggccgagccggtacaaatcccggaaccccggaacgcccatcagaaacagggacggcggcattgcggaccggacaagccataacgctatactttttcccggcagcgaccttcatcgaccacccggctgtttccgggacaccccgcaccccgctccagcggttctctgggaccgcttttttattccgccccttttttccggccgtttttattgttattttgataacaaatgattatatttaaccacccgatcccgaaagaagctccgtttccgggatatttttcggcaggcaggagcgaacaaacctgaaaaatcaaactctaaacgaccggaaaacatggcaaaaataaacactccggaggaattgcgcctcatgcgcgaaaaactgcgtgccgacctcgagatccgggaaaacagcaacacacccgatgagctgccccagatccgggtttcgatggacgaatgcggcatcgccgccggagccaaagcggtcctcgcaacattcgtcgaagaactggccgcccgtcgcatccggggcatcgtaacccagaccggctgcgccggacactgcaaggacgaacccaccgtcgaaatcacgctgccgggccgcaggccggttctttacggccatgtcactgccgagcgcgtcgcggagctcgtcgagcggcaaatcgtccggggcgaaacggccgaaggcctgatcgaagcataaactgcgtccggcaatccgagaattttcggaaagaggcgacaggtccgaccgtcgagccgggcatctgaaacgaaggaaaacgatccgaatctttaacaagcatccaacccgatggcaaaaatcaataactacatcctggtatgcggcggcacgggatgccgggcatcgcggagcgaggagatcatcgcggccctgcgccgggcgctcgaccgaacgggagagtccgagcgcacacgggtgatccgcaccggctgcttcggcttctgcgagcaggggccgatcgtcaagatgatccccgacaacaccttctacgtctcggtcaaacccgaagacgccgaagagatcgtccgggagcatgtcgtcaaaggccgcaaggtagagcggctgctctacacggcccccgacacggggcagcacgtacccgacagcaagcacatgaagttctacaagccgcagctgcgcatcgccctgcggaactgcgggttcatcgaccccgagaacatcggcgaatacatcgcccgcgacggctacgcagccctggccaaagtgctcggcatgcagcccgaccacgtgttgcaggagatcatcgactccggcctgcgggggcgcggcggaggcggtttccccaccggcctgaagtggaagatcacgcgcgatgcgaaagccgaccgcaaatacgtggtctgcaacgccgacgaaggggatccgggcgcattcatggaccgttcgatcctcgaaggcgatccccactcgatcctcgaagcgatggccatcaacggctactgcacgggcgcctcgcacggactgatctacatccgcgccgaatacccgctggccatcgaacggctcaggcgagccatcgaacaggcgcgggaatacgggctgctgggcaacgacatcctgggctcgggcttctcgttcgacatcgagctgcgctacggcgcgggcgccttcgtctgcggcgaggagacggcgctgattcattcgatggaaggcagacgcggcgaaccgaccgtgaaacccccgtacccgagcgaatcgggctacaagggctacccgaccaatgtgaacaacgtcgaaacctacgccaatattccgcccatcctcctgcggggcgccgaatggttctcctcgatcggcaccgaaaagagcaagggcaccaaagtcttcgccctggcgggcaaggtcaataacgtcggcctgatcgaggtgccgatgggcaccacgctgcgcgaagtgatcttcgaaatcggcggcggcatcaagaacggcaagaagttcaaggccgtgcagacgggcggcccgtcgggcggctgcctcacggagaagcacctcgacaccccgatcgactacgacaacctgctggcaagcggatcgatgatgggttcgggcggcatgatcgtcatggacgaagacgactgcatggtgtcggtggccaaattctacctcgaattcaccgtcgatgagtcgtgcggcaagtgcacgccctgccgcatcggaaacaaacgcctgctggagattctcgaccggatcaccaggggactgggcagggacgaagacctcgacgaattgcagaacctcgcccgcgtaatccgcgactcgtcgctctgcgccctggggcagacggcccccaatccagtgctttcgaccctggaaaacttctgggacgaatacgtggcccacgtgcgggaccaccactgtacggcccaccgctgccgcgacctgatgagtttcgtgatcgaccccaaggtttgcaaaggttgctccctctgcgctcgcatgtgtccgccgggagccatcagcggcatccccaaacaaccctacgccatcgaccaggcccgctgcatcaagtgcggcacctgcctcgaaaaatgcaagttcggcgcaatcagcatccgctaaccactcctccaagacaaatccgcatggaaacgataaaactaaccatcgacaaccgaaccgcagaggtcgccccgggcaccaacctggtcgaagcggccgcttcggtcggcatcaaaattccgacgctctgctacctcaacctgcacgagctgggctgcaagaacgaccccggtgtctgccgcatctgcgtcgtagaggtcgaaggacgcaaaaacctggctccggcctgcaaaaccgtctgcacggaagggatggtcgtccgcacccacacaccccgcgtcatcaacgcccggcagaccattctggagctgatcctctcggaccaccccaacgaatgcctcacctgctcgaagaacggctattgcagcctgcaaaccatggccaaagacctcggcatccgcgaggccaagtacaagggagaaaccaccaagccgatgatggacctctcgccgtcggtggtgcgcaacatggaaaaatgcatcctctgccgccgctgcgaaacggtctgcaaccaagtccagaccgtcggcgccctgtcggtcgtaggccggggattcacttcggtcctctgcacggccttcaacgatccgatcctaacgaccaactgcgtcaattgcggccaatgcgtagccgtctgtccgaccagcgccctctcggagaacagcaacatccgggaggtgatgcaggcgctcgccgatcccggcaagacggtcgtggtgcagaccgcccccgccgtgcgcgtggccctcggccaggatttcggactggaaggccggagcgtcacgggcaagatgaccacagcgctgcgtcggttgggcttcgactacgttttcgacaccgacttcgccgccgacctgacgatcatggaggagggcaccgaactgctccagcgcctgaacaagtatctcgcgggcgaccggacggtcaaaatccccctgatgacctcctgctgtccgggctgggtgtcgttcatggagaagcatttccccgaactgggcgagaacctctcgacggccaagtcgccgcaacagatgttcggcgcgatcgccaaaaactacctggcgcccaagctgggcatcgaccgccggaatttcatcgtcgtatcggtcatgccctgcgtggcgaagaaatcggaagccgcacgccccgaattcggcaaagacggcgatccggacgtgaacatttcgatcaccacgcgcgaactggcccacatgatccgcttcgccaacatgaacttcgacgaactggaggagagcgatttcgaccgtccgctgggcgaatcgaccggtgcaggcgtcatcttcggcaccacaggcggcgtgatcgaggcagccgtgcgtacggcatacgaaatacaaacgaaaaaaacgcttccgaaactcgacttcaccgaactgcgcggactggcgggaatccgttcggcgacgatcgacttcgacggcgtacccgtcaaaatcggcatcgcacacgggctgggtaacgcccgcaggctggtcgaagagatccgcgccggccgatcgccctaccacgccatcgaaatcatggcctgtcccggcggctgcatcaacggcggcgggcaaccctatcaccggggcaacgaagagcttctgaaacggcgtgccgaggccctctacgccgaagacgccgccaaaccgctgcgcaagtcgcacgagaatcccgacattcaggcactctacgaagagttcctcggcgaaccctgcggaccgctttcgcacgaactgctccacacccgttattacgaccgcaaaccggtcgtggaacccaagaaataagacgttatggaaaaaatatgcctctcccaacggagaatcgacgagataaagaacgtctgccgaaagtacggcaacgacccgggcgaactgatcaacatcctgcacggcgtgcaggacacgctgggctatctgcccaaagaggtacaggagctcatcgccctggagttgggcatctcggccgcacgggtttacggcgtggtgtcgttctattcgttcttcacgatgaagcccaaaggcaaatacccgatttcggtctgcatgggcacggcctgctatgtccggggcggcgagaaggtgctcgacgaattcagacgccagctcggcatcgaagtcggcggcacgacccccgacgggctcttctcgctcgattcgctgcggtgcgtgggtgcctgcggactcgctccggtcgtgatgatcggcccccgggtctatggacggctcaaggtgaccgatgtcaaaggtatcctcgacgaaatccaggccctcgaaaaagagatctgacgacgcggtattacgttaaataaaagagaccgggcctgcacagaaatacaggcccggttcgttccctccggaacaaaagccgcctcgccgacaatcggttccaccagtccgaacgaaggcccccgcaacgatccgcagagcctggatgatcgaaaacaggcatttttcccgccataaaatgcaccggaaacccctccccgacatctgcaagccaacaggggctatgctcgaacccgaaaaaacacgtaccccgtcacaaaagatttcgcggaaaagtcgtcaaaccggataatttggcgtacctttgcccgacaaatcatcataaatgaatcaattagaagaatttaaggctttaggactgtccgacgatatacttactgccattgccaaaaaagggttcgaaaccccctcggccattcagagcctcaccattccccacctgctcaccaccgacaaagacatcatcgcacaagcacagaccggcacgggtaaaaccgccgctttcggcctgccgattatccagatgctgacttcccgacggaatattccgcaggccatcgtcctcgttccgacccgcgaactggccctgcaggtgacgcaggaactcatttcgttcaatacccacgacctttcgatcgccccgatctacggcggcgcctcgatgaccgaacagctgcggcgcttgaaaaaaggcatcgacatcgtcgtcggcacgccgggccgcatcctcgaccacatccgccggggcacgctcgacctctcggcgatcgcctacctggtgctcgacgaggcggacgaaatgctcaacatgggtttcatcgaggatatcgaagagatcatgcacgccatgaccggccccaaacgggtgctactcttctcggccacgatgcccgaccgcatcgcggcgctggcccgcaactacatgcacgaacccgacctcctgaaggtcgaatcgcagcacgtcacgaccgacctgacgaaccagatctatttcgaggtgcgcgaaggcgacaaattcgacgccctgacccgcatcatcgacgtcgaacctgagttctacggcatcgtcttctcccgcacccgaacgggcgcggacgatatcgtggccaaactcctggaacgcggctatgcggccgaagtccttcacggcgacatttcgcaggcccagcgcgagaagatcctgggcaaattcaagaaaaaacaggtcaatatcctggtggctacggacgtggcggcccggggcatcgacgtaagcaacctcacgcacgtaatcaactactcgctgccgcaggattccgacagctatgtccaccgcatcggacgcacgggccgcgccggtaaccagggaacggccatcaccttcatctcgccctccgagatgcgcaaattcgggttcctgaagcggacgatcaaggccgacatcaagctggaacagctccccacgccggccgacatcatcgccaccaagcgcaacaagatcaaggaagatctggacgccatcgtcgagagcgaaagttacggcgaatgtacggggatggccgccgaactactggagagttatccgcccgaagtggccttgagcgccctgctgcgcctggccttcaagaacgagctgagcgagagcagctaccccgaaatccgctcgatcgacgtcgatcgcaagggcaaggcccggattttcctcgccttcggtgcccgcgacggctacgacacccgcaaaacggtccggctcctcaaacaggagtgcggactctccgaccacgacatcgacgacgtacgggtcatggaggacttctcgttcgcaacggttcccttcgaccaagccgaaaaagtcgtcaggactttgaataagctctcgcacggacgtcccatcgcggaaatatcgaaagacagcccttcggcccgcacatccggcggaagacaatcccaccgccgcagggagtccgacacccgatccggacgcaaaaccggccggaaacccgaaagccgggaatcctatcgccaagactcctccgtgcaggaggctttcggtgcgcccgacgatcggaacggacatcggaaatccgtccgcagcccaaaaacgtccggcacgaaagccgggaagaaacccgcaacaaccgtcaaagcgagcagcaaaacgtacacaccggagaaaaccgctgcgaagagagcttccgaactccccgaaaactggttcgaagagtggttcggccagcgacaacccgcccgcaacaaaaaagggccgaaccggaccccgaagcgaaaaaacagagattaaacatcaaaccggctccccggccgaggcgggtcgttcgtccgcaggagatttggcgatcgtgaagctgaaggtcgccccttcgccatagaccgactccacggtcatctcgccgccgttgcgatgcaccaggtccaggcaaagctgcaaccccagtcccgacccctcctcttttccggtcccgtaagtggtgaaatacatcgcaggatcgagcactttattcaggtcttcgggcttgatgccgactccgaaatcacgcacccggacaacggcgtgggtcggggtttcggccgtggaaacgataatcttccctcctccttccgggctgtatttgatcgcattgctcaacaagttgcggacgatcgtcttgaccatatcgacatcgcaccgcacgtgaatcggcgcgggaatgtcgtattcgacgacaattcctttggtccgggccaccgactccgaaattttcgaggaaaagagtacgacttcggccagatcgacatcctgatacaccgtatgcatcctcccggtctgacacttcgtccacttgagcaggttgtcgagcagcgaaaaggtgtcttcggcaatgtcgttgcccatgcgaagcatatcgaggttcccggctccgacccgctccgcatccaggctgtcgagcagggtgttgaacagcatcttgaggcttccgatcggagagcgcaggtcgtgggcgatcaccgaatacatcttgtcgcggctggccagggtctcctgcagctcctcgttctgccgcacgatgacgcgctgcgcctctgcaataaacatatgatgcgccacccgcgtaatcagctcctcgtgattgaaaggcttcgacacgtaatcgctggcccccatcttgaaccctttgacaatgttttccgaatcgtggagcgccgagagaaaaatcacgggaatccggcagaatcgctcgtcggccttgagccgctcgatcacctcataaccgttcatgtccggcatcatgatatccagcagaatcagatccggagattcgctttcgaccttctcgagcgcttcgcggccacctgtcgcagtcacgatcctgtatcccgcctttccaagtatggttttcagcaacaggacgttggtcgcaatatcatcgacgacaagaatcttataattttcaggattgaccgagagattttccataaaacagaccttgtgacacacaagcgaggtagataaccgctaacagatttcatcggagtacgaagaaattttccgaaacggcaaccgtatcgaaggcaaggaacgacagccgactatggccgaaaaacagcgcgtatcccgacgcggaaccgaatttacacggacgatctgcacccgattcggaggcgattcacttcaagaacttttcgatgcggaccttcagttccatcgggttgaagggtttgacgatatagtcttcagctccgtcctgcaacaactgaatacgctccgaagtactgtcttcgctcgataacataaccatccggatatgccggaaccgctcgtcactcttgacggcatggagaaattcatctccccgcatgtcgggcatacggatatccgaaataatcagatcgggcaaatctccggcctccatctgctcgagtacaggcttcggactgtcgaaatagcgacagtcgtagtcccgccccaggcaggccatgatgattttgccgatcatgtccttgtcatcgacaacgaatatcttttgcttgtccatattttcaacactttaatacgtctgaagaacacaaatttcgtacaaatagtcacttttttgtcacaatcgaaataattgtgtctaaaatcggttccaaatgtataaagaatatacacaaaaacgacaaaaatttgtcgttttcatagctgtttcctccgaataccggtgcatacaaccgcaaaataaccgtctgaaaatcatatatccttgtatgaaagtcggatcgctgcatatgggactaaccgacaaaacggtcctgctcagcctatgctgcccggtaaaaaataaactgcaacaaagagagagtagtagaatggatacggaggaatcaatgggaaatcataattttcatccataacctcataaccggctaatcgaaaacgaccggcaaccattcctcgaaaaaaatacatattatatttataccaaacgaaaaccgcattgcagctatctgcaacgcggtttctgtgaggtctgaagcgaacgccataaatttgaatcgaattttaccgattttaattttatcttatctacatatcaatattttacatccatttttcatcaactgcgaggtctggaagttttcgaaaattcggcctatgtatgacaaatgtatgacaaaaatgattacatttgcaatagacaaaacctcctgacctatggcatccttctgctaccgcatccgctcgacccagaaaaacaaactggtcaaaatccaaattctcttcacagttggccgtggtaaccagttctacgccgactgccaatatatggtgctgacggacgcctgggacaacaaacggcagacagtcaagagccgtttcacctttaccgacgacttcaccgagcagcaggggcgcgagctgaccaagaatctcgccgaactgcgaagccacatcctcggagagatcaccaaggatcccgaacacgcgatgacgaaaacgcggctggagaagatcatctacagtttccaccacccgcgcagcctcaccaccggccgccatgtccgcagccgcgaatcgctcggcgactacatcgcccgcttcacgcacgagatggaggacggcacccgactgaacatccacaaactgcgctacggggcatcgacaatcaagaactacaaagggtttatcattcaattcgacgagttctgcaaagcaaagcgaaagagattcgatttcggcgatatcgatctgaaattctacgacgattttgtggcatggttcacggcgaaagattattcgatcaataccatcggccgccacgtcaaggagctgaagatcatcatgcgggcagcgcgcgaagaggggctgcacgacaatggtctgatcgaaagccgcaaattccgcgtactgaccgccgatgtcgagaatatctatctgaccgaatcggaaatacgtgctattgccaacctcgacttatccgacaataagcacaaagatattgcccgcgatgtctttttggtcggctgctacacggcacaacgattcagtgattactctacgatcaacgagggtaacatacgcacgctggagagcgggcagctggttatagacttgaaacagcagaaaaccggcaaccacgtcattattcccgtccgacccgaattgcaggcgatactggacaagtacgaaaaccgtttgccgaaatcctacgaacagaaagtaaacaagttcatcaaagagattactcgggaagcgggtatcacggaaaaaatcgaggtatcatacgtcgaaaacggggaaaggaagacgcacttggtagagaagtgcgatttggtaaagactcatacggcacgccgcagcggtgcgacgaatatgtatctggcgggcattccgaccatcgccatcatgaaaatcacgggccacaagaccgaaaaggagtttatgaaatacatcaagattacggaagagcagaccgcaatggagttgatgaatcatccgtatttcagcggcagatagttcgaaatgttaccaccgtaaaatttacgacgataacaaaatctcgaatgagcttttagaagaagcattttaactcctctttatttgcgaataaattgtaactttacagaaaatagaaatatatgacggttgaggaactgacaaatatactcgattcattactgattctgcctgcggaaacggaagtggtggagttcaagagggccgaacgcaatttcgacgatcgggatttgggacaatacttttcggcattgagcaacgaagcaaatttgaagggcaggccttgcgcttggctggttttcggtgtggagaaccatacgcacgaggttgtcggcagccagtacaagaacagccgtccggcgctcgacgcaatgaagaaaaagattgccgatcagactacgggtcggcatacgttcgtcgagatacatgaattgcggtacaggaacggcaaaagagttgtgatgttcgaaataccacctgccccgcaaggtattcccatagactatcaaggccattattatggtcgtgacggagaatccttgcaagcattgagtatggacaaaatcgaaagaataagaaatcaagccaaattgaaagattggagtgcggaaataatcgaaaatgcctcattggaggatttggatccggcagccatcgtcaaagcaagggagttgtacacgaatgcccgcaaggacaaagctgacgagattgcgtcatgggatgacacgacttttctgaacaaggcaaagattacgattcggggaaagattaccaatacagccatcgtgttgctcggcagagaggagagtgagcacctgatctctccggcagtcgccaaaatcaaatggattctgcgcggaccggataatgtcgagcgcgattacatgatcgcctcctgcccgttcattctggcggttgacaaaatatacgacaaaatccgcaatctgaaataccgttacataaatccggagtacaagacgctcttccccgaagagatcgacacgtatgaaccgtatgtcatccgcgaggcattgaacaatgcaatcgcccatcaggattatacgctcggcggtcagatcaacgtagtggaatacgacgacaaactggtcttctcgaacaagggttcgtttattcccggcaatatcgaacgggtactcgtcagcgatgctccggaggagcgataccgaaatcaatttctggtaacggctatggtgggactcaagatggtcgatacgatcggcagcggcatccgcaagatgtacaattaccaaagacagagactatttcccctgccggattacaatttggccgacaatcgggtagaagttaccataacgggcaaaattctcgatatgaactacgccaatattctggcgggaaatgcggatttgaacctgctcgacatcgagctgctgaaccgtgtacaactggggaaaccgttatccgatgaagagatcgcccgattgagaagcaaacgcctaatcgagggtcgtaaacccaaaatatatattgcaaaacatatcgcccaaaaagtcgggcagaagatcgaatattcggaacataaggggctcggaaataaacgttgcgaagagtttctgctgacggcattgcgggatcacaaatcattatcacgcagggagatcgacaaactgctgtggaaccttctttccaacctgctcgacgacagacagaaaaaagataaaattacgaatcttttagctaagttgaaaagacaaggcaagataagaaacgaatcacaaggcccgaactctgattggttcattgtttaattttacacgctttttacacgctttttacacgctttttacacgcttgtatattataaacatctaaaaatatgcatattacgatcttgtaccccccccgccaaaaaaatatcaactatgtcccgtcgtcgcaaaatagagatcaaagcctccgaactggcatgcttcgacacgttggtcgagacattgcgcacccggccggagtttgcagacttagacccgacaagtctacatgtgtgggcatacgagaattacgaaccgacgatcagaaatgcagcaagggctattcgtcattttgatcattggttggcggcacatcgaaacgaaatgtttctctcgtcgtattcgggcaatcgattgttctgtaaaaaggatttggccgaagctctgggaattacacgcccgacactcgaccggtggattgcgaacggctggctggaaggatgcaccgcacgcgcattttcgaatggagaacggtgctattcggcagacgcagtccgtgaagcattggaaaaattaaaataaaactcacaaaaacagctttgtttcggaggacggttcttatcaaaaaccgtcttcttttattcatcgaaacaatcactttacacactgcggtcaaaacggaaaacagaggtagaccgatgcaattcattcctaaaattccatagactgtccgactatgtccgttcgtggcagaaggcagcattattttgtaacacaattacttattttagacagcctcgataaatgattttctttgcgacgttaaatcgaataaaccatggcaaaggaaatctatctgaatggcatgactgccgatcaactttcgaagatgatccgggagtccctgcgcgacgaattgcaacagttccgtcccgcacatccgaaaaccgacacgaaatatctcacacggcgcgaaaccgcccaccgtctgcgcatctcgctcgtgacgctcaccgactgggtgaaccacggcaagatccgcgcacacaagatcggcgggcgcgtcctgttccgcgacagcgatgtcgaagcagccttgaatcgaatcgttcccattaaataattcagtgaaagaataagtatttttcttttcactgaacatagattgttatgaaaacgattcaagctatcaaacatctttccattcggacctacctcgccgaacaaggtttgcacccgaccaaagacaatccgcgatacggtctttatctttcaccgttacgcgaggaacatacgccgagtttcaaggtggactacgtgcgaaatctctggtatgacttcgatgcgcccatataggctacacaataaatatctctatggcaagagattaggttagagttcaacagacctatcctactttctttttccgctatgcataccctattgtatacgcatagcctatatctcatctccttaatcgtgtcaatgaacgatgcaaacccgaagtttgcgttgaacagcaccgcagtttcgctctgctacgccttacgcgtgtgctgttagaactttctttgaagaatcaagcaacttacctttgaaataaagctccagaaaggaggtgttccagccgcaccttccggtacggctaccttgttacgacttagccccagtcaccagttttgcccgctaacgggaatttcaccatctcgtcccgtccgtcgggcgtggtgtaatgaaataatatagtgttcgctctgacaaggcagtcgaataaatttaccgtttcgctcatgccctccatcttcatctcgttggcgattattattcctattatatcgtttatctcttcaaggtcgcttttccacccgattattcattgtttgttctttacaagtgcgatttccatcgttcattgacacgattaaggagatgagatataggctatgcgtatacaatagggtatgcatagcggaaaaagaaagtaagtaagggcgtatgggggatgcctaggctcttggaggctaagaaggacgtggtaagctgcgaaaagctgcggggatttgcaaacgagactcgatccgcagatatccgaatgggacaacccggcaggtagaagacctgtcacaccgcgaggtgagctaaccctctgaactgaaacatctaagtaggaggaggaaaagaaagaaacatcgatttccaaagtagcggcgagcgaaatggaagaagcccaaaccgatattgttacggcaatatcggggttgtaggactgcaatattcaattaacaatgaactggaatggtctggaaagtccatccatagagagtgaaaggctcgtacaggtaagtttgttatgcgaaagcagtatcctgagtatggcgggacacgaggaatcctgtcagaatcagccgggaccacccggtaaggctaaatactcccaagagaccgatagtggaccagtactgtgaaggaaaggtgaaaagaaccccgaacaggggagtgaaatagaacctgaaaccatacgcttacaaccggtcggagcagcttcgtgctgtgacggcgtgcctattgaataatgagcctacgagttactaatcactagcgaggttaagtgcaaggatgcacggagccgaagcgaaagcgagtctgaacagggcgtttagttagtggttgtagacgcgaaaccttgcgatctacccttgagcaggttgaaggttgggtaaaaccaactggaggaccgaacgaataagcgttgaaaagcttctcgatgacttgagggtaggggtgaaaggctaatcaagctgggaaatagctcgtactccccgaaatgccttttggggcagcgttgtaataaagagtctactggaggtagagctactgattggatgcgggggcttcaccgcctaccaaatcctgacaaactccgaatgccagtagtatgatttacagcagtgagtgactgggtgctaatgtccagtcgcaaaagaggaacaactcagaccagcaactaaggtcccgaagaatatgctaagttgatctaacgatgttttgttgcagagacagctaggatgttagcttggaagcagctattcattcaaagagtgcgtaacagctcactagtcgagcgacagagcgtggataataaacgggcatcaagcatatcaccgaagttctgggcgcgagagcgcggtaggggagcattccattcagcgtcgaagcagtttcgtgaggaattgtggagcgtatggaaaagcaaatgtaggcatgagtaacgataatgcgggagagtaacccgcacaccgcaagaccaaggtttcctgatcaacgctaatcggatcagggttagtcgggtcctaagggtaagccgaacggcgatctcgatggataatcggttaatattccgatactaacatatacctcgatggagagacgaaggaacgtaagtgccgccacctgacggaataggtggttaaagggcgtagatataggggcagattaagagttagtccttgctgaaacctgacagtacagagagcctacgggcaatttgatagagcacccaagtcgacttccgagaaaatcttctaagttatagtatatgttacccgtaccgtaaaccgacacaggtggtcgaggagagtatcctaaggtgctcgagtgaatcacggttaaggaactaggcaaattaaccccgtaacttcgggaaaaggggtccctatgaaagtagggcgcagcgaagaggtccaggcgactgtttatcaaaaacacagggctctgcaaattcgaaagaagacgtatagggcctgacacctgcccggtgctggaaggttaagaggggatgtcatcgcaagagaagcattgaatcgaagccccagtaaacggcggccgtaactataacggtcctaaggtagcgaaattccttgtcgggtaagttccgacctgcacgaatggtgtaacgatctggacactgtctcaaccgtgagctcggtgaaattgtagtcccggtgatgatgccgggtacccgcaacgggacgaaaagaccccgtgaacctttactatagcttaacgctgaatttgggtacacaatgtgtaggataggccggaggctttgaagcgggcacgccagtgttcgtggagccgacgttgaaatacggccctttgtgtatttgagttctaaccctgcgaaggggacaccgtttggtgggtagtttgactggggtggtcgcctccaaaagcgtaacggaggcttcccaaggtaccctcagcacgaatggtaaccgtgcgcggagtgcaatagcataagggtgcttgactgtgagacatacaagtcgaccaggtacgaaagtagggtatagtgatccggtggttctgcgtggactggccatcgctcaaaggataaaaggtactccggggataacaggctgatcgccgccaagagctcatatcgacgcggcggtttggcacctcgatgtcggctcgtcacatcctggggctggagaaggtcccaagggttcggctgttcgccgattaaagtggcacgcgagctgggttcagaacgtcgtgagacagttcggtctctatctgttgcgggcgtaggaagattgaggggtcctgactttagtacgagaggaccgagttggacgaacctccggtgtatcggttatgctgccaagtgtactgccgagtagccgcgttcggtctggataagcgctgaaagcatctaagcgcgaagccatccccaagataagtcttcccttgaggggcgtaggagactactacgttgataggctgcaggtgtaaagacagcaatgtcaaagccgagcagtactaattacccgataggctttctttttcgaatctttatctcatctcctgtacgtgtcaaatttaccggatgcgacggattatatatcgaaaagatatattcgcatagttccgatatattggagcaaaagttcttttaggtggttatagcagtgaggttccacctcttcccattccgaacagagaagttaagctcactaacgccgatggtactgcgctacgcgcgtgggagagtaggtagccgcctcttcaagccggatcctgaacaagggtccggctttctttttgttcgcgggcttgcgtgtcccttcccctcgtgcggttggctctcagcggcagagcctgccaaggagggttatgtcggtttagaggttgatattttgtgcctggaggttggcgtgggcatacgctttacagcacgtattcgtagtgggggggcggtttataaacgcagccaaagcaatttcggatggggagggacagccaacgggtattattactacggagctttcgatctgcgcaacggaccggaggccggttatgacggtgaggacacgagttcgtccagcgacaagtattacgatatggaattgatagtcacttacaccaattgtccttaaaaaacgtatgattatgacacgaaaaaacttgatattattgttgttctcactcctgacactgaactcctgcaacaaacatgaaggtccggagttgaggttttgcgagaactacatccaaaactattgtcagggggatttggtattgctgtcccgaagtccggaccgccccccgcaaatcccggcagacccgcaaacccccatacgcaatttttggatagaattgaccgattgcgagtggatttcccccgaaagcgaccctcaggagttcgaacgcctggcgattcgcaacggggacgtcggttataaccgctggctcgagttttgggagtacccctctgcttttgccgataattttcagacaatgcatattaccagcaatgccgactgggatgaagagcatccggcggggacattgctggacgatatcctgtgggccgaattttggtcctacgccgattatatccgtagcggatacgaaacagggggcggcaacaatgtacagatgctcgtcgaggatttgaaagccgacgatatgcagatgatacgtgactatgtgattatctatttcacaaagaccccgaccattgatcccattcacacgctcactgtcgaatggaccaccgtcgagggggaggtcaagaccgcctcgctcacttgccggccgcaggtcaatgcgaaagaataacctgcgtgcagtcacgtacgatttaacaagatagaagagccatgaaaaagagtttattgctattgttgctgccgtttttatgcggatgttcggaaaaggaagagccgatcggaggacctgtcatcggacctacttatttgatagcccgttacgtggaaggagatatgaagctggactatattccccggaccgctgcgacggacggcaaatcgaatacgctttacatagactgggccgacaccgaagagtattataatccggatatggagaaatacaatcttggccggcaagagttctggactcccgaaaacaaggcgaaatatctcgaaatcgcaaaaagaaacggggatgaaatcggtgcgtacgagggcggcacgcctcccggtctgtatttcggcgatcagattgcccttgccgataatttcacttcgatgcatatcacgagcgatgccgactgggatgaggagcatccggccggcaaaccgctcgacgacctgttccgggtatcggtgcggagttggaaacagagggatgaatacggggccccgcttctttgccgcgagaggatggatcggatcgggccggaacatttgcagatgatccctttcaatccgaagaatccgtgggacggccggaagaatttgcggccgatcgaaatcgaaccgcttgccgagcctgcgtcggagcaacatcaccgattgacgctcacgatgaccaccaccgacggacgtacaaaatcgacttcgatcgactatccgccgaaaacgggactatagccgaccttatactgtagcccgatcaatcggaccggcgggaacaggtaacttcaggtaatattaattgctgccgggggttgtctgtatggggaaattatctccgaggaaacttgactgtacctgtcgccgggaacagcggcgcaacgtccgttgcaagcaaaatttcgggacatgaaacagaataatctgatgtcaagtcgtattcagagcacgaaggaaaaggagaacggaaacgatcctcatacaggaatcgtttccgttctttattacatccgccggtcgctatttcttcccggtttcggcgatgatcttccgaagggcggcggtaaactcttcggccggcatggatcctgttatcttgcccagcaggtcgccctcggtattgaatacgaggtaggtcgggatcgaccgtatgccgtgtttgcctgccagggctttcccggtcggtttgtcgatgtcgtacttggccgcgacgaaatattcgtccataaagtcgcccacctcctttttcgagaagacgtcgcgctccatcgccttgcaggggccgcaccaggtggcgtataaatcgatgaaaaccaatttgtcttgagcgatggcctctttgcggaccgcatcggtcgaagagtccaggaaccgtacctgcgcgtcggctgcggcgctgatgcccagcacgagtaaaagggtaaaaagaatttttttcattttcgtattttattaagaataacgaaacgggtgctgctaaaattgtgccgcctcgttctgcgccgtactcaacaggccgcaggccgcttggatatcttcgccgcgagaggtgcggatggtcgtgtgtatgcctttggcggtcagagcatcacggaacgcgatcatggcccggtcgtcgggggagaaataaggcgatccgggaattttatggaaacggatcaggttgatccggcacttgatgccgtccagcaggcggcatagctcgcggatgtgacgcggagagtcgttcaggccgctcatgacgatgtattcgaacgatacccgccgctggtgcgtgaaatcgtatcggcgcaggatttccacgacttcgcggatcggccatgccttctctatgggcatgatttcggcccgttcgtgcggaaaggggttgtgcaggctcacggccagatgcacctgggtcgcctccagaaatcgttcgagccgggaggctacaccggcggtcgaaaccgtgattcgtgtgggcgaccagccgaatccccacgccgaagtgaggacttcgagcgccggcagcagactgtccaggttgtcgagcggttcgcccatgcccatgaaaacgacgttggtgagccgttcccgttcgggcagcgactcgatctggttgaggatttcgttcgtcgaaagggagtgctggagcccctgtcgtccagttgcgcagaaacggcagcccatacggcagcccgcctgcgacgagatgcagagcgtcgcccggtcaccgtcggggatgtaggccgattcgatgaaatggttctgcgaggtacgatagaggtattttttcgtgccgtcggtcgaaatgctgactttttcgggagcggtgagtccgacttcgtacgtttcggcgagcagggcccggtgccgggcggatagatcgctcatcgcctcgatcgttgtcgcgtgcttgtcgtaaagccagcgtgcgatctgtttcgccgcgaaacggggcatctccaaccggttgcagagagcttccaattggggcagggtttgtccgtaaagatattcgtgtcggggcatggaaagcggtcgtgagggagttttcgggaacaaaattagtcaaaaataaagatttttcagaccgaaagcgctgtttttgattttttatccctatatttgtcggtagttagtgtgccttcgggtcacttgaaaggataacaataaacaggaacaataatggaaattaagaaatcaccgaaagccgacctggagaacaaacggggtcttttccttgaaatcggtttggtcgtggcgttggtacttgttattggtgcattcgccgtgactccgaaggaacatcgtatcgagaaagtcgatcttggctatgctcccgtcgaagtggaaattgtcgaggttacccgcgaggaccagaagccgcccgaagctcccaagaaagtcgatatggccgtcgtgagcgacatgctggaagtcgtaaccaacgataccaagatcgaaacggagatcgattttgcggagtttgatgtgaaccaggcgatcgaggtggctcccgttcagaccgaggaggtcttcgaagaggagattttcatcgtcgtggaggagaaagcgtctttcatgggcggcgacgaaggtactttccgcaactgggtgcagcagcgtgtgaaataccccgcgatcgctcaggaaaacggcatccagggtaaggtaaccatctcgttcgtggtgaatacggacggttccgtatccaatatcgaggtgttgagaacccccgacaggaccttgtcggacgaggcggtacgtattatcaaatcttctccgaaatggaccgccgccaagcagcgtaacaagtcggttcgtcagaagttcgtcattccgatcgatttccgtatttcggattaaggtttgtttgaaacatttgataagggtatcctgcgtgaagccgggatacccttattttcaccgtgcaggaagatgtgtcttgccgaaggcgcatagtcgtgcagaaatcgtatggcagattggaacagaataagaataaagagattgtagcgaagaacgatcaacccgcttccggggccgggttcgaacgggccgtactggttgcggtcatccgggatcaacaggatccgcgtcaggcggaagagtacctcgccgaattggaatttttggctgaaacggccggtatcgtaggtgtccgtcgttttacgcagcgccttccgcagccgtcggcccgtatttatgtcggtccggggaaattggaggagatcgctgcctattgcaaggaagaggagatcgacgtggcgattttcgacgacgaactctctccgtcgcagacgcgcaacatcgaggcggcgatgccctgccgcatcctcgaccgcacacgcctgattctggatattttcatgtcgagggcacagacggcttacgccaagacccaggtgcagttggctaattaccagtatatgctgcctcgtctttcgggtatgtggacgcacttggagcggcagcggggcggtacgggaacgcgcggcggtgccggcgagcgcgagatcgaaaccgaccgtcgaatcatccgcaaccggatcagcaaactcaaggaggatctgcaaaagatcgaccgtcagatggctgtccagcgatcgaaccggggttcgatggtgcgtgtggcgctggtgggttataccaacgtcggcaaatcgaccctgatgaacctgatttcgaaaagcgaggtgttcgccgagaacaaactcttcgccacgctcgatacgacggtgcgaaaggtggttttcgataacctgcctttcttgctgtcggataccgtgggtttcatccgcaaactgccgaccgaactgatcgagtcgttcaaatcgaccctcgacgaggtgcgtgaagccgacctgttgctgcacgtggtcgatatttcgcatccgcagttcgaggaccagatcgccgtggtgaagcagacgttacaggatatcggtgccggggataaaccggtttatctggttttcaacaaggtggacgcttatacttacgtggagaaggagcccgacgacctgacgccttccacacgtgaaaatcgttcgctcgaagacctgaaacagagctggatcgcccgggccaatacgccctgcatctttatttcggcggtcgaaaaaatcaacatcgagaagctgcgttcggatctgtacggcatggtccgtgaaatccattcgggccgctatccgttcaacaacttcctctattgacctgaaatgaaagttaaataaatacaaccttatgttgcacattctcaacagtcagaacaccgttctcaacaagtttgtcgccgaaatccgcgacaagtcgatccagaaggattcgatgcgtttccgccgtaatctggagcgtatcggagaggtcatggcctatgaaatatcgaaaacgttcgagtatgcggtgaaggtggtcgaaactccgctgggcgaggcttcggtagcgatgatctccgaccaggtcgtgatcgctacgatcctccgggcgggacttccctttcatcagggattcctgaactacttcgacgatgcgcagaacgctttcgtttcggcttatcgcaagagtaccaaggacggtaagtttaccgtcaaggtcgaatacatctcgtgtggcgagctggagggcaagactttgctgctggtcgatcccatgctggctaccggttcttccctcgtgctggcttacaatgctttgtgcgaacggggcgggcagcccgcgcatacccatgtcgcggcggttatcgccagcgaacagggggtcgaatatgtggagaagaatatgcccaagcgtacgaccacgatctggtgtgctgcggtggacgaggaattgacttcgcgagcttatatcgtgccgggtatcggcgatgcgggcgatttggcttatggcgagaagatctgacgtgcgacgcctgttgtttttgggagccgttttctgtacgacagtaggttggatgctgttgcagaagccggctttcctgcttttctaccacactcgggcagcagaggcctctttcggagagtggctcggagttctttggcacggactctcgctcgactgcacggtggcgggttacgtcaccgcttttccggtcgtcgtcgtgctggcatcgttttggattcccctttcgcagcgggtgtggcggatcattctgacggtctatttttcgctgatcgcactggtgacggccgcgatcttcgccgtcgatctcaacctgtacggctattggggctttcggctcgacggttcggtgctgatctaccttgccgatcctggggaggcgcttgcgagtgccagttggggcgaagttctgcggcagattataatcatgctggtttatgccggggcgatgatctggagttatcggcggattttacggcttttccgggtcgaacccgtttccctgcggggccggatcgtcccgacggttgcggcgctgctgatcggcggcttgacttttctggcgatccggggcggtgtgacggtcgccacggcgaatgtcagcaaggtctatttcagctcgaacatgttcctgaaccacgctgcgacgaaccccgttttttcgtttctctcttcggtcggggacaatgagaactatgccgaggcttatccgttcttcgaagaggagcggcggaagactcttttcgaagagttgcggggcaaccgtcccggggccgatgccggtacgccccgactgctgcgcagcgaccggccgaacgtcgtactgatcctgctggagagcttcggccgaacgatcatggacgaaacggtgaacggcgagcctgtgatgcccaacatgcagcgtttcaagcgggagggtgtctggttcgaaaacttcttcgccaattcgttccgtaccgatcggggacaggtggccgtcctgtgcggatttccggcccaaacgaccatgtcgatcatgaagctgccgcgaaaaagcgccacgttgccttcgctggcccgttctctcggccgggaaggttatcgttcggtattcatgtacggcggcgacctgaacttcaccaaccaggcttcgttcatgtattcgactggctgggaggaactgatctggcagaaggatatgcagctcgacgccccgacttcgaaatggggctatgccgacgacgtggtggtcgatcttttcggggacgaggtggaagcgctgggcagagcggaacaaccgttcctggcgggtctgctgaccctttcgagccatgagccgttcgaggtgccgttcgcaaaattcgatgacaagctgttgaatgccatggccttctccgatgcacagatcggacgtctgatcgaccggctgcgggagtcgcccgtgtgggacaatttattagtggtgctggtcgccgatcacggctacccctatccgtacgatctggcctataacgctccgttgcgacaccggattccgatgatctggctcggaggcgcacttgcggcccccccccgaacagtagatacgtatgcctcgcaaatcgacatttgcgccacgcttctggcgcagctgggccttccgcacgacgagttcgattacagcaagaatattttcggtgcgactccgccccataaattcggttactactgtttcagcgacgggttcggcgtgatcgacgccgacggcgaaacggtctatgacaatacgggtgaaacggtgctttctcaaaccggcccgcagtccgaaaggttggagtggggcaaggcgatgttgcagaccacttacgaagatatcgggcggcgctgatccgaaagagccggtacggaaaaggtcatcgcgggaagcgatgaccttttttcatgggtggaggcaggcttatttatcgcctttgggcattagggagcgggcttccagaaatgcgtaaaaagcctccttgtagccgtctgaaacggggatatacgttttgccgaagacgatccggccccgctcgatgatccggattttggcgggttggacgatgtaggagcggtgtacccggacgaaacgctcggcggggagctgctcttccagcgatttgaggcttgcgagcgacagcacggggcggggttcgtcctcgacgtaaatctttacgtagtccttgagtccttcgatgtagaggattttatctaattcgatctgccgaagccggtattcggtcttgacgaagatgctttcgggcccagcttctgcaggcgatggtttgccgacgctgcggcgcttgagttcgaaccattcgaaagctttgttggcggccgtcaggaagtcggcatagctgatcggcttgagcaggtaatccaccgcacccacgcggaatccttcgacggcatatcggtcgaaagccgtcgtgaagacgacccgggtccgggccgggagcatccgcgaaagctccatgccgttgagttccggcatctggatgtcgcagaaaagcaggtccaccggttcggttttcagggcttcgagtgccgtgatgcctccgttgtaagctcccttcaattccagaaagggggttttcctcacgtagctttcgagcagttcgaccgccagcggttcgtcgtcgataatggcgcaggtcagtttcatcggtcggtcaggttaatgcggagcagagtttcgtacgtgtcgccgtgttgtccgtatttcatttcgtaacgcccgggatagatcatttcgagccgacggcaaaggttcgcgagtccgatgcccgagccgctgcggtcggcccccgattttgggaagaagctgttctcgatccggcaggcgagcactccttcctcttcccggatgtctatgtcgatgaacgagggacggtcgttgcttacgccgtgcttgaaagcgttttcgaccagcgagatgaagagcagcggcgccacgagagtgtgcgacggattttcgggcagcgaaacatcgagtcgcacatggcgcggcaggcggatgcgcatcagttcgatataattgcccaggaagtccatttcggctttgagaggtaccgtcggccggctgctgtcgtagagtacgtaccgcagcaggcggctcaggtcgtgtaccgtttgctgggcccggtcgggatcgagctggatgagcgaatagatgttgttgagcgtgttgaataggaaatgggggttgagctggctcttgaggttttgcagctccgcttcggagcggctgcgctccaagtccttgcggatgttttcggcccggtaccactgtcccgtcatccggatggcgacgctcactccgactaccagcaggtagagcatggcattgcgcaggaagaagaacatcgtatcctgccacggacgctccatcggcggatggtgggggcgcggcggtattccgaagcggaagaaaaggtgtacgagtagcatgactccggccacgagcagcgcattagcgagcaggaatcgccccacatgccgcgtgaaaaggtagcggtcgatcagcaggaggtagttcacgtaaaatactgccatgaaggagaggggaaccaccagaaaccgcacgtattcctgcatgttcataacgggttcgcggccgcccggtacgaagaggggaaggccgaaaaccacgctccaggccgccaggtggagccagaagcccgtatgtctggattgcagggatgtcatcctgttgcaaatataggaattatccgggtatttcatgcttctttttctgtatggcgacggctgtttcggattcggccggttttccgaaaaaatagggtcggtatcttatcctgaaaagcggttattcgtagcgcagtgcgtcgatggggttgagcatcgcggctttctgggccgggtaccatccgaagaagatgcctgtaagggtgcagacggcgaacgaaaggaaaacgctccagggctggatatagatcgggaatgccgcgaagatattgacgagtacggcggcgcccacgccgacgaggatgccgatcacgccgcccgtgacgctgatcaggatcgattcgatcaggaactgcgccagaatatcgcgccctttggctccgatactcatgcgcaggccgatttcccgggtgcgttcggtcaccgagacatacatgatgttcatgatgccgatgccgcccacgagcagcgaaatgcccgccacggccgccagcagcagggtcatcatgtcggtcgtcgaagtgagcatcgacgaaagctcctgctgggagcggatcgtgaagtcgtcttcgtcggtcgccttgagcttgtggttggtccgcaggatttgcgtgatctcctcgatggcctggtcggtatattcttcgctcaatgccgagcaggtgatcgattgcaggtgggtgatggcgaggattcgcttctgaactgtggtgtagggggccagaatcaggtcgtcctggtccatacccatactgttataacccttgctctcgagtacgccgacgatgcgtagcggaatctttccgaaacggatcactttgcccacaggactttctccgtccggaaaaagctcgtccacgaccgatttgcccaccagacataccttggcggcggtcttgacgtcctgttccgagaagatgtccccgtcctcgactttgtagcgccgaatgtccaggtattcggggctgataccgtaaacggtcgtcggcgtgttgttggcaccgaagatggcctgcccggaactgttgaccgaaggcgaaatgtagctgatatagcgcgcctgcgcctgaatgtcttccaagtccttgagcttgagcgactccatgtccgccgcgtcgagccgcacaccgccccgccggtcgccgccgggatggatcatgatcatgttcgatcccatttcgctgatctgggcctgaatgctccgtttggatccctgtccgatcgccagcatcgtgattaccgaccccacgccgatgatgatgcccagcatggtgaggaatccgcgcagtttgttgttgctgagtgctttgaaggctattttgaaaagattcgtgaggttcatggtctgctcgtgtttccgtgctcgggttcggatggatggtttgttttagtcgtcggttgcgggcagtttcgccagagcttcggcagcgctcaggatctcttcgttgcggacgtcgcttatgatgtgtccgtcgcgcagggttacgttgcggctgctgtaacgggcgatttcggggttgtgcgttacgaagatgatcgtgcggccctgggcgtggagctgctggaagagcaccagcacttcgaagctggtgcgggtgtcgaggttgcccgtcgcttcgtccgcgaggatgacggcggggtcgttgaccagtgcccgcgcgatcgccacgcgttgcatctggccgcccgacatctggttgctcttatgcagcatgcggtcgcccagaccgacgttgcgaagcgcctgttcggctcgttcccgtcgctgcgcggccgagtaggtcgagttgtacatgagcggcagttcgacgttctccagcgccgtagttttggccagcagattgtagttctggaagacgaaaccgatcttgcggttgcgcagtgtggcacgggcgttcttgtccatcgagcgcacggcgattccgtccaggtagtattcgcccgaggtaggcgtgtcgaggcagccgagcgtgttcagcagcgtcgattttcccgatcccgaggtgcccatgatcgtcacgaactctccttcggtgatcgtcagcgaaattccgcgcagtgcgtgcaccacctcgtcgccgacgacgaaatcccgtcgtatgttgtccaatcggatgacctctttcatcgtcgttcgctattttttcttgtcgttgcttcccggaggtcccggcatgaaggggctgcgctcgatggcggcagtctcctcgcggggcttggccgttaccagtccggtaacgatctcctcgctgcccgtgagcccttcggtgatttcggtcatgtcgccgctggcagcgcctgcatatacccggcgggggcggagcgtcgttccctccttcacccacagttccctgcttcccggagccgcctgactgtccgtttcgactgcggtcaatccgatctctcccaacagttccgcattgggaacgaagcgcagggctttggtcgggacggctgttgcgtcgtctttttcgagcgtgaagatcgtcacgttggccgtaagtcccggtttgagtttcaggtcgggattcggagcgtcgatgaccacttcgtaggtgaccacgttcgattcggtcgtggcttcgagccgtacctggaggaccgtcccctcgaacgtgtcgtccggataggcatctacggagaactgtacccgctggccgtcggcgacctggccgatgtcggcttcgtccacatcggccacgacctgcatctgtgtcaagtcgttggcgatggtgaagagcgtcggggtttcgaatccggcagccaccgtctggccctcttcgacggcacggctgatgaccacgccgtcgatcggcgaggtgatggtcgcataacccaggttgcgctttaccttgaccattgccgcctggctctgctcgtaggcgttgcgggccgtttcgtagaggtaaaaagcctggtcgtactctgcatcgctcaccagttgtttttcatgcagggtcttggtgcgggcgtagttcttggtctggtattcgtattcggttttgctgctggcgagttgtgcctgagccgattcgagttcggcctgtagggtcaccttgtccatttcggcgatcagttgtccggctttcacctggtcgttgtagtcggcatagagcttgtcgatgatgcccgatacctgcgtgccgacctcgacctgcgtaaccggctcgaccgttccggtcgccgtcaccgagttgcggatggtgatatggcttatgggggcggtttcgagcaggactttcggccctttcgaggggcgtgcgatcagccagatgcagacgcctgcggctactacgcccgccgctatgagcagattccgttttttcatatcttcgattatcgatttatccggtgcggccccgcttggcggaacccgcttgtgcggattagtaaatgtcgctcgcaggaagcccctgatagatgttgagcagttcgatactcagcagggtgagatatttggcttgcaggacctgttgctgtgctgccgaatattcgttttgggccgtgatcagctcgacggtgtttttcactccgacgcggaactgttcgctggtcagctcgtaactctcccgggcgtatttctccttttcgcgggccgagagatactgggcctgggccgatacggcgtccaggtaggccgattccacgttccgtaacagctctttttgcagcgatgtccactccagatagctgtcgttgagggcgattttcgccttattgacggccgtgcggttcttacggttcgagaaaatcgggatgttgagcgtgagccctacgttttcgttgaagcggttccatatctggctgccgctttcgaagtcgttgttcgacatatgtcccgttcccacgctggcggatagggatatggaagggaagaatccggcacgtgcgcttttttcttccagcttcgccgcctcgatgcccaactctcccctacggatctgaggcatgactttcagagccgttgcgtatacctcgtctttggacggcagagccttcagcacgttctcttctttaacccctggcacggccggattcatctcttccataatatctaattcaagcagttgcttgagttgcagcttgtagttgtcgagtgtcgaactggccacgacgacctggtattcgtcgctcgaatactggctttggagctgggcgaaatctacgcggctgatcgagccggcacgcaacatctcctcggcccggtcgcgctgggccttcgaggcttcggccgtgctgcggttgattcgcacggcatcggcggcgtaaaggcactgcatgtaagcctgtacgatggcgatgcggatgtcgttcacggattcctcgaccgagagagcatccatttgattctggactttctgcctcttgacttccgtacggagcttgccaccttcgaagatcgtcattcccgccgttatgccgtaggtccccgtataactgttgttgtccgtgacttcggacgaagggtagttcgtgtaactttgcgtggtcgatgccaccagcgacggaaagagggcggctttcgcctgtttggtatcctcgatgcccgaaagttggttgttgcggctttgccgtacctggatgttgttctggtaagcgtagtccagacactcctgcaaggtccatgttttggacgcttcctgtgcggttgcattccgtagccccgacagaagaagggagcaaagcagtatcggcaggagtcgtttcatggttttggttttgacgcaaaactaacgacggctttccgtgcgtgcaattgaaatagacgaagaggggaattttatcgacgaacggccggtttcgggaaataaccggaataacgaaccctgcgatccgctcggatttcgggatgcagggtcggatacgaaaaagtccgccgacctttattagggtacggggtcgtatccgctgccgccccagggatgacagcgcgagagtcttttgagcgtaagccacgttcctttcaggggaccgtacttgcgcagcgcttcgagcgcgtattgggaacaggtcggcgtgtagcggcacgaagcgggagtgaagggcgatatgcagcgttgatagaactttaccagcacgatcagcggcagcgtgcagacccgcctaaagcctcgccataatttgttccatgattttctgtacggcatgttctatgacccggtagggggtgagctctttggatgaatagatcagggcgagatccagtgcgacgggatttccctcccggtcgaagatctctttgttgagccggtaagcctccttcatacgacgacgctgcagattgcgcttgttggcccgtttctgaaacttcttgggaaccgaaaagagtacttcgaccgaaggaatttcgtccgcttcggcgatccagacgtagcgcagcggatagacgaatccgctctccccgctttcgaacaggcggcggatggccccgaacgaacgaagcctttcctgacggggaagcgaacggtctgtcatagctgaaacaggtaactgtatgcggttttaatgccgttttcggtcggtgtcggcgaaatcgcgacggaaatagcgtcgtccgcttcttgtttgccggatggaatccttcggaatcgcactttgaaccggtgatggtcgcacggagccgttccgttatttcttctccgccggagtcgtgcgccgggtacggcttttcttggctaacttatgctgttgggttcggatgaactcctctttgtcggcgtcgtgcgtgacggcgacatcttcgatctgttcgcctttcgccagtttcgtgaggtaaatatcgacggctttggccatcgaagggaccgtaggggtcggagccatggctttgaccttgatgccgacatcgaccgcagcacgcagcgtgccttcgccgaaagtggcgactgcgggcagctcctcggcggggaagcgttcgagaatggccttgacgtccgatggcgaatagagggccagcagatcgaatttcttgatgtccaaatcgttcaggtcggcggcgactgtgcgggccagaatcaccggagagaactgtaatttcaacttggcgagcgtttccggcagttcgggtttatggggttcgctcaatgccagcatgaatttttcttccttgtgctttattatcagctcgatgaagttggtgaaactgccgtcggcgaaagaaattttgcgtttgcgatatacgatgtatttttgcaggtagagcgctacggcttccgtctggcagatgtatttcatggtttcgggaaccgtaatccgggcctcttcgcaaatgtggaaaaaactatcgactgtcgtgcgcgaagtgaagatgacggccgtatgagccagtatttcaacacgctggcttcggaattccttgagcgatacccctactacgcggatgaacggcatatattcgatttcagccttgtgtttctgggataattcgtagaaaggagatttttcgaccacggccggacggggctgtgaaaccaatactctatgggctttcaaattcagaacggttttatcgggttatcaaattcttgtcagcgagagccacacgaagctcacgggaaaaatttcgacggcacaaaggtacaaaaaccaatgcaaaatcgaaatttttttcgagagaaagagcatgagcgactctttcaggtagagcaacagcagtgctccgccgaggatgaggatgccgaaagagaggatatgcccggtgtcgggcgaagccagcaggaagagtaggatcaacgggcacagaaagacgacagaaagtgctaaatagttgaattttagcgctacaagctgatctgtgatcggtcgggagagggtgacgtaacccgtgatccggagcagtcctacctggaaaagcaggagaacggccaggccgaccgtagcgagcagtcccagtaccgggatccaggcttcggggacgacctcggggatggggaaccaacggtccgtcagtctcaaggtcagtagagccagcatgggaagtcctattccgatggccgcccacaggaaccgggtgtaggtgctgccctgcgtgtcggtcatgcgtcccggcttcgaccggtcgagactcaatttccgacagaggatataaacttcccgcaggttatggtagatgatgaccagataagcgaaaaccagggccagtacgatcccttggaaaggggccgattcgtatatgggacggacggattgcgtcggaaacggttcgatcgcgagtgtcgaaccggctccgaacagctcttcggccgtgacggggggtgtcgcctgcagggtgtcggggggaatcgtcgccagcgaatcccgcagccggaagatggattcccgaagggccgtttcggttgtcggcaggctgtcggacagttgccctgccagcgaatccgtgcgtatttcgggttgcagggccatcagtcgaagtagcgtttaagggtaatgcggatatcggtgcctttgcccagttcggagtaaacgacgccgatccggccctggtgatactcttcgatcacgcggcgggaaagggagagtccgaggccccatccccgggttttggtcgtgaagcccggttcgaagatccgtttccagttgcttttggggattcctttgcccgtatctttgatgtcgatcatcacgtgtttgtcgtcggaggagatctctacgtcgatccggccgtgaccctgcaaggcgtcgagcgagtttttgatgaggttctccacgacccattcgaacaacgcggtgttgatctgggctttgaccggcgcgatagccagcccgttatagtcgatcactacgttgcggggtgcccgcgtgcggaaatacatcaccgatccgcttactatttcgttgatattctcgggggtgagcggagtttcggaaccgattttcgagaagcggtccacgatcttcatcaggtggctcaagtccttgttcatctcttcgacggcaccctgatcgacgggctgcgtgcgcaggtattcgatccatcccagcagcgaggaggtgggggtgcccagttggtgcgccgtttctttggccagtccgatccatacgcggttctgctcgtcctgcttggtcgagcggaaagcgatgaaacccagcaggatgaagatcgcaatgacggagagctggatgtaggggaaccagtagagggtcttgagcagccgggactggccgaagaatatgatgtgtttgtggtctttgccccagtagtattggatcgtgatcggggtgttctcttcggtgagctggttgatcttcttgcgcaggcggtcgggatggttgatgatctcttcgggaatgagatgcgagtgcaataccttcaggttctgattggtgatgatgaaggggatgttgttgcgctgactcaggatgtcttggacgaaggggtcgttactcgagtcgctcatcacgcgctccatggcgtgtacccagagggccacttcgtgctgttccttctcccgcaggcggcgggccatgtcgttggtgaacagcagggacagcgtcaccatcgtcactccgacgacgatggctacgatccgcttgcggaacgagagtattttgcgccccagtttgagcatagccggttatttcttttcggacgtctgcatggtcgtgatttcttggtattccgtcggattttccaacacttcggtagcccggagaacctcggtgtcgtcacccaggttatgttcgatcacgccggcctgatagctgtgacgcagaacgatgtcgttgttgatcgtttcggcgatctctttccgataggtatgcagattggtctgcgtgtcgtctttcaggtcgccctcgatcgctgtgatttcctgggccaggtcgctgtaaaggtcgttttcggccgcttccttcaggaccttgagcacccggcgggtttccgattcgtaggggacttccttgccttccataaatttgacgaaggcgtcgtagtccgcatcggtgatcgagaacgtgcggttgtcgatcgtgtcggtgtggtgttcctgcatgtattcgtccacgaaatcctcgatgaatcccatagccagcagagtaacggcgaaacggctgatgtactgaggctcggtggctatgtcgggcgaaatgccgccgccgtcatagactttgcggccgccgcgggtcgtaaattcccgtacgagcgaatcggctaccttgccgaccgtgccgtcctgcttgcgcgaggagtaatcgatagcctggatgcagcgccccgagggaatgtagtatttggcggtcgtgagtttcagcagggtattgtatcccagcggacgggtcgtctgcacgaggccctttccgaagctcttctgtccgatcagtacggcccggtcgagatcctggagcgagccggcgacgatctcggccgccgaagccgaattgccgttgatcagcacggccaacggcagatcgggcaggatcggatcgttcgcggtgcggaagacattctcctgcgtagcggcccgtcccttggtgcggaccacctccgtacctttgggaacgaacatagaaacgatcttgacggcttcctgcagaatgccgcctccgttgccccggtagtcgaggatcaatccccgcagggtatcctgtgtgcggagtttctcgatcgcggtgcgcatctcttcgtacgatccttcggtgaagtcgctgtgctggatatatccgatcccttttgcgacgaacccggcgtaggggacgctgggaatggctacccgttcgcgcgtcagagtgagagtgtcgtgctcgccgccgatcagccgttcgatgacgattcggacggtggtgttgggcgtgcctttcagggcggaacttatctgtgcggggtcccaacccttggtgtcctcgccttcgatcgagaggatcttgtcgccgatgcggatgccggcccggtcggccggggagccttcgtagggctgtgcgaaaattacgtaatcgcctttcttgcggatcatcgaaccgatgcctccgtacttgcccgtggtgagcaggtcgaagttcgacatctgctcttcgggcagaaattcggtgtaggggtcgaggttgcgggtcatgccttcggcggcatcctgcattagttggtcgggatcgacttcatcgacgtagaagagcgaaagctcccgcatcatattgaccagtagctccatgtttcggcccagcccgaaatcgttgggcttgccgaaccagaagagcgtgcaaagcagggcgaggaccgcaggaatcgccgcgcggcgaagtatgggacgtttcttattcattttcattgcgtgttctttcgagataggactgcaggcggtaataaacccgggctacaccccggcgaataccttcgatcgtgatccattccccggtctgggtgactcggatttcatcttcgaaaaggagcgtgagccgcttgaagagggagtctgcccggaacaccatttcgtgttcggattcccggaccggcttgaagccctccgaaacgaaggcattgaggatctgttcgcggttcttgcgcaggctgccgatctcctgccggcggatgaagccgaacttgggatacagggccgaaagaagcaccaccgcgacgatcagcacctgtccgcgtgtggagtggacgagggccgagaaggtttccgaaggggtcagcaccgaggtattcgtgagcagcatcagcgccatgataatcagatatagaacgcagagcgcgataaaatattttacggaacggatcaggtacttcatggtcgttatcgtttttataaggttgaatttcttgtctgtttccgatacggaggcacgtgccggcgctttgcgtccgtatttcggattttttgtttcacggcttctgcccggcgaccgcatcggccacctcctgcatcagccacttgggggtggacgtagcaccgcagataccgacggattcggctccttcgaaccattcgggacgcagctccgaagcctcttcgacgttatagctgcggggattggcccggcgacacacttcgaaaaggaccctgccgttgctcgacttgcggccgcagacgaagataattacgtcgaatcgccctgcgaactcctcgaggtgactttcgcgattggatacctggcggcagatcgtgtcgtgggcgaagacctgcgcagggtcggtggcccggctgcgcatccggtcgcacaggtgctggaacagggagatgctttgcgtggtctgcgaaaggaaatagatcggacgtgtgaagtcgatctggtcgaggtcttcctctgtttcgacgaccagcgtgggagcttcgacctgcccggtgagtccgatcacttcggcatgtccccgcttgccgagtatcacgacctgccctccgacctgccgcatcttttcgtgtgcttcgacgacgcgccgttggagtttggccacgaccgggcaggtcgcgtcgatcagctcgatgcccagctcttccgccagccggtaggtcgaaggaggttcgccgtgcgcccggatgaagaggctccgtcctcccagttccggcatctgatcgtgggtcaccgtgtgcatgccgagccgttcgagccgctgcacttcgacgcggttgtgtacgatgtcccccagcgagaagacctcgctctgctcctgcagagcctcttccgcgcgggagatcgctctcacgactccgaagcaaaaaccggaatggctgtcgatttcgactctcatagccaaggttgttcgttattgtattttatgcgatgcggttatcggccgcaagctatcctatcgaaacgctccatgaaccaggtcatttgctcttcgacggtcatgtggctgttgtccagcactacggcgtcgtcggcctggcgcagcggcgagatcgcgcgtgtcatgtcggccttgtcgcgtgcgacgatgttggcccggatctcctcgagcgatacggagtcgcccttggcctgcaattcatcgtagcggcgccgggccctgacttcgggatcggccgtcatgaagattttcatttcggcattggggaataccaccgtgccgatgtcgcggccgtccatcaccacgccccgctgccggcccatcgcctgctgcatggccacgagtttttcgcgtacctggcggatcgagctgacgcggctcacgcagttgctcacttcgatcgtgcggatgcgtccttccgcccggtcgccattgacgtatatgtcgctcgcaccccgctcggggttgaagcggaagtcgatcgaaatgtcgtcgagcagggcgatcaccttctcttcgtccacgatgcccgaaacgatggcgccgtgttcgagcgcgtagagcgttacggcgcggtacatggctcccgtgtcgatgaagatatatcccagcttggctgcgatggttttggcgaaggtgcttttgccgcacgaggagaatccgtcgatggctatgatgatctttttaagcttggagcattccatgggggatgaggttgaagaaggtggataaaatcgtatagacgccgagcactccgatgataatgccggccacatggttgatcgtgagcatgtggcggggccggaaccggcgtcggaaaaggttgatcaggaaggccagcgacgtccaccagagaacggcgccgccgaggaatcccaggataacgaggaatccccgtcccagaccggctatgtcgaaggtttcgatcgtcgaaattttgaaaatggcgaaaaaagtcaggatgtagggaatgaccagcacgaaattggcgatcgtaaggccgaaaatcgaggcgaagtcctgcgtaaggctggtcttgccggcccggttgcggcggatctgcggtaccgggttttgaaagaagatatagacgcctacgatgactacgaagatgccggcgattacgcgcagcaactggttgtattggtcgatctgggcctgaagcatcgagtagcagaaataggcgatcatcgccatcgtcgtatcggcggcggctacgccgagccccgacacgatacccgagcggcggcttttgctgagggtccgctggatgcatagaacggccaccggtcctaccgtgatcgacgcggcgacgccgacgcagaatccgcgcagcaaaatctcgatgatttccagatacatgctctttcttgcaggttttcttcgcaaagatacgaaaactaacttaaaattcggcccggtttcggaaaaagggatgaaaagagagttgcaggggatttgtcccggtataatgttgataagttctctataactttgttttttaaggacaagagtgggctcgaaaaatggatatatttgtccgtgtacctaaaaaagacaatgctatggcagagaaccaaaaaatggagatagatctgggcgaggacgtagcccagggcaattacatcaatctggcgatcatcgcacattcggtttcggaattcatcatcgactttgcgacggtccttcccggtgtgccgaaagccaaagtcaagagtcgtgtgatcctgaccccggaacatgccaagcgcctgctgctctccctgcaggagaacattacccgctatgaaagcaatgtgggaaaaatcgaaataccggctccgcagcgccattctcccggcgattttccgctgggcggaggtcccaagatcggtgaggcttaaagtccggtatttccggtcggctggtgcgggacgggcggttgttttgccgaagccgtgaaacaagagaaggccggccgggaagaggcggacgaaggcgcgacagctatgccgcgagagtttttgcagccgggtcggcagtgccggccacgattgaaaagccggaaggaaatgtttccttccagcttttaggtaatggctttcgccaaaggtgacttagggtttattcgagcacttcggcgacgacgaaattgctgcctccgatgaagatcatgtcctcctccgaggccatctcccgcgcccgggccaatgccccgctcaccgtgtcggccacttcgccccgaagaccgtatgcagccgctttttcagccagcttgccggccggaagcgcccgttcgttgccgggctgcgtgaagatataacgggcctctttgggaaacagaggcagtacgctcgataggtctttgtcattgacgaatcccagtacgcagtagaggtcgcggtggggggttgcggccaactgttccgcaacgtagcggatgccgtgggcgttgtgtcccgtatcgcagatcgtgagaggtttgtcgccgagcttctgccaccggccttgcagggccgtgcccgaagcgacggtgcgcatgccttccgtgagcgcgcgcaggctgatcgtcagcggggtttcctggtgcagcaggtcgatgacggcgattgccgtcagtatgttgtgtacctggtaattgcccgtaaggtccagttccaggttgaaaactttgttgtcgcggtggcgctggatgctgaatttctggaaatccccttccgtcgaatggttgatgcacgcgaaatcgttttcggcatagacgattttggacatcatggccgttgccgcctggtcgaagacgtggttgtattcgtcgctcttctcgccgatcacgaccgggatgctttttttgatgattcccgctttctcggctgcgattttgggaagcgtgtcgcccagcagggccatgtggtcgagtccgatgttggtgatgacgctcacgatcgggatgatgaggttggtggcgtccaaccgtccgcccagtcccgtttcgatgacggcgacctcgacgtcgctctggtcaaagtagtcgaaggcgagggccgtggacatctcgaagaacgagagtccgagctccttcatgcagtcgtagtgtttgtccacgaagttcacgactttctgcttggggatcatctctccgtccgcgaggatccgttcgcggaaatcgcgcaggtgaggcgaggtgtagagccccgtgcggtagcccgcctgttggagtaccgaggcgagcatgtgcgacacggagcctttgccgttggtgccggccacgtggatcgtgaaatagttgcgctggggattgcccaggtgcttgcagaatgcggtgatgcgttccagtccgggtttataggcttcgggccccttctcctggtacgaaacgagcgatgaaaataggaattcgagcgtttggttgtaattcataatgcaaaagttccggccccctccggatttatgcgggtcttgttagcggtcgtatgtctgttccggttacttcaccagatggtttttcttcttgattcgataggcgatgtaatagaggatgcagagtcccatgaggagctccgaaattcgtcccaggtagtcgccgtatcgggtgtaaaaagtcagttcgctgttgagttcgacctctccggtgaggatgccgcgacggtcccagcccagcttttgctgcacgtccccgcgcgtgtcgatgaatcccgaagtgccggtgttggcgctgcgggcgatggcccggcggtgttcgacggcccgcaggcgggcgatcgagaagaggtgtttgtgaccgggtgtgtcgccccaccagccgtcgttcgacgaaatcagcagggctctggctccctcgcgtacgaatccgccgtagaagttgccgtagagcccttcgtagcagatcggggttcccacgctcacgccgttatgaacgaatgccggacccggttcccccacgccgagttgccccaccgtgccgcccaggtcgatcaccaggaatttgagggccttgaagatccaggtcggagtgctttcgacgccgattaccagccggcccttgtggtggatcgggaggcaggcggtcgtgtcgatgccgagcgtcgagttgaatttgtcgtaaaaagctccccgttcgttttgacgggcggtttccgtctgttcctccggcggataatagacgatggtttcggctcctgtgacgatcatcgcaccggaagatttttcgcgcaggatctctcttattttcgtaacgaccggagcctgcggcagatagcgctcgtcgtaggcgtagggccagaccgtttcgggcagtacgatgaagtcggagcctgcgggagcctcttcgatcatcgagagcagcagcctttcctgcatctgctccgttcccgcagcgaatttgtcgtaacagtcgatgttgggctgcactacggataccgtgaccgagccttcgtcaggtgcttcgtaactccagaaaatgcccagcgaaacgagaatcggaaggagtacgaccgctccggcccaggtccaggcttttgcgtcgcgccgacggcgccaggcctcgtaaagcaggatattcgagagaagcacccagagcgtaccgccgaagatgcccgtgtattcgtaccattgcacggcccacacttcgtgcgagaatccgttgcccagcagcagccagggccaggagaagtcgccggtcgtgtaccagtactccgtggcgatccagcctgaaacgagcagcgtgtaggccaatgccttcggtccctttttcgaaaccgtatggaagagcatgaaggcgaccatgttcaggaaagacgaggcgatcgtcgcggcgaaagggcctacgggagtggccagccagatccaccagatcgtagaaacattccagagtacgaaggtgaggagcgcccagccgaaaactttccaccacgagcggcgggaagcgtcgtacgaatcgctgatccagagcagcggcaccaatccgaacaggagggtgaatcccgttcctccgagccatcccggcgagagcaggagggtcgagcaaagtaccgcagcgaatttgcgccccatagaagtcattaatttctggcgacaaatgtaacgaaagccctgcatatttcaaaaaatatagaatatgaattccttctttgcggaatatgccgctgattctcgaaacccccgacgaatcgcgttgggcggaggagatcgcggaattaaaacggttttcggaagaatagtcgaacggttgcgattcgcttcccgccgaaacaaccgtttcggcgggaatttttgtgcggatttccattcgcaagtttgtaaatcggaagcgtattcagtatctttggataggagtgtgagtgtttcccgttccttcgaacttataaatccgcctgccataaatattttagcggtctttttacggtattttccggcattcgaagagggggaggcgttccggaacagtattccgtctgcgcgggagattcaggaaatagctttcgggtcgaaaaacagccgggaagcgggtggctggatcattcaatatgcggggcgtcacggttacgacgcagaaacgatcgatcgtttttggagggtgtacagtatggttgctaacgaggattcttactaaactaataattaaaaaagttccgataatgaaacgattgttttttctgatagcgatagcttttttgatggctggttgcagtgacaaggatgatgaaaatgttgatatggcgagtgtcggacattatgtttggcaaaacgaaagcgatcaccgcataacattgaccgtaataggcagatttgaaaatgaagttttgctcccgaaagagcgtatttcgaaaacgatgatcggatttatttttccgccatcaccacgttcttatacaatagaggggatgaaaatttctttcgatgacgggtcttatggcggtgttttctccatcccgacggagtatccgactgcgccgtacaatccgtgtgacgagtataattatgagatgggagaggaatataaggagagcggaatgcttcagcgacaatggacttatacgtttactaacgccgactacgatgcggccgtagctcgcgggccgatgacggagcagtagcgttttgctgaaacagcgaaatccttcgagtcgaaatccccggcacagattcgctgtgccggggatttctatccgggaatttgaccgaagctttttcgcgtggaatgtgcagaagtcggattgcatgtccgaacccgtgcgttcggccgttgccgccgaacgggaatattccgatcgtaagattgttttcgattactgttccggccctgcatggccgcccgtttgccgtaccgtgtcgggtttggccgcagtgagcgaatcgggccgcagagtttccggcgccggttttttttgccccgttttttcgggtgcgggcatttcggttgcagccggtccgatcatcgaagtataggtgttgtggcggatggcggcgatgacgattaccgcgatagcggcgatggccaggatcagtccgatgattcgtttagtcatggtcgttttgggttttaagcacttcgaccgcccgcagcatgacggggtcgatcgggtagatattcacgtaaaatcccgcttcgttcaggggggtgttccgtccgatgtaggcccgtaactgggcttcgatcagcttgcgcgagcgggcgatgtccttgtagtcgggctgtacgccgttgcgggctgcgtatcggatgaagtcgttcatcagctccttgtcggcatcgagcagggcctggagttccggaatggtcttcacggcgttcagggcgtcgcggtgacggtcggcgtattcgagcgtatagcggaagaggatgttgcgtcccgacacctcgaggaaatagcgggttacgtcggtcgtatcgaccggcacgaacaggtcgggcatgatgcctcctccgccgtaaaccactttgccgccgggcgttaccttgcgcagagaatcgttgaagtgaatgctgtctgccgagaaaaactcgttgtgccggtaacggttccaaagatcttcttcataccccagcgcatcgccgttggtgtagggtttttggatcgagcgacctgtgggagtatagtagcgtgcgacggtgagccgcagggccgaaccgtcgggatagggtatctgccgttgtacgagtcctttgccgaacgagcggcgtccgatgatcgtaccccggtcgttgtcttgcagcgctccggccagaatttcgctggaggaggcgctgaattcgtcgatcagcaccgccaggggcagctcttggatcgtgccgtttccgtcgctcatttcatccgtgcggttgtggtttcggtcttcggtatagacgatcagcttgtcggccggcaggaattcgttggcgatgcggattgcctggtcgaggaaaccgccgggattgccccgcaggtcgaagatcaatcgcttcataccttgtgccttgaggttgttcaaggcggtgatgagctcgttgtgcgaggtgatggcgaactgggagagtttgatgtagccgatgctgtcgggcagcatgaaggccgcttcgaggcttttgatcggaatggcgccgcgcgtcacttcgacctcgactggttctgcgattccctgccgttcgagcgataacttgacctgtgtgccgcgtttgccccgtagccgtttgacaatttcgttgttgggtatcttctgtcctgccaccagcgaatcgttgatccggataatgcggtcgccggccttcactccggccttgtcgctcggccccgaagggatgacattgagtacgatgaccgtgtcgggcgccatgttgaagaccacgccgatgccgtcgaactcaccctgcaacggctcgttcaccgcctccatttccgatttggggatatagaccgagtgggggtcgagttcctccatcagcaggggaatcacttgctcggagagcgaatccatcgacaccgaatcgacgtattccgtttcgatcagcgagagcgtataggccagtttgttggtcggatgggtcagttgttcgaccaggttccgcagttgggcttcgggagtgttgcgacccagatagcgtcctaacagcagccccagcacaacggctgcggcgagcaggatcgggagcaggatcgcaagacgggagtttcggtacatcgtgttttcgtcggttttatggggcgttcgtgacgatcgccgccgcttatttgttcttgaacgtataggtcagtcctacgctcaacagcaactgggtctggatgtcgtagttttgcgcccggttgtagtagagctggaaattgaacgtcgtggaaaggtattttgttgccttgatgtcgatggtattttcccagcgtaccgtcggatggatttgcagcatcggtttatcgccgattccctgtgcatcatcccaggcctggagagctttttcgtaggcgctgacgctggtatatctgtttttcatgttcaaattcgacatccagcccatgaaggagaagagcgtggtgcggtagcggaaaatgccctttttgccgaacgtccggtcgaagtcgatctggattgaggaaccgccctcgtatttcgaggttttgttcgcattcgaaaggccgtaagcctgccagcccggtttgtcgtcccatctgttgctgcggaccttggcgctttcgacgaatacggcgctcagggcgatcggcgagaggttgatcttgatcggaaaacgctcgaggggacaggtgtaggtgaaaccgcccgatatgtcgaggtaacccggcgacataaaggtacttttccgatcgtcggccgtctgctgcgagcgcgacacgtaaccgttggcgaactggctgcggaatttgatgatcgagccgacctgccaactcttgttgatgatgtaggcgggattggtcgaaatctgaaattcgtcctggttcttgtaccaggtggcctcgctggtcgtagagcctccgtcgccggcgacttcgatattcatccggttgtagccgaacttggcatcgaacttggtttcgatggtaaagcgctgtttggtaaaggtgtgatgcaggaaaagcgtggcggccagaccgatcgagttatcgccgcccgaagtttcgatccacgaatcgctgtacgaggctaccgatccgagtatgccgccgccgaattcgagggtattgcgctccttgcggatcgcggcacgctcggcacggtagcgggcgcggctgaaataactctgtgcatcgaccgtcgtggggcggacttcgtttttgaggattctttccgaggggtcggtcttgacttcgtcgatcgtgatctgtgcagacacgggattgcttatcgccagggcgcagaggagggttgaaagcaggtaaaattgtttcataagcaactaattgatacaacaaatttagggatttctctacaaaaatcgctacatttgttagcaaaacgataaataataagataaagcgaacagtatgaaatatttcggagcacacgtaagtgctgcgggcggtcctgaaaacgcccctttgaatgcacataaaataggagctacgggcttcgccctttttaccaaaaaccagcgtcagtggagcgcaccgcccctgacgccggcccagatcgcggctttcggagagaattgccgggccgggggttacgcgccccggagcatcctgccgcacgacagttacctgatcaacctgggacatcccgagcgcgaagggctcgagaagtcccggacggccttcatcgacgaaatgagccgctgccaggccctcggcctcgatcgtcttaatttccatccgggcagccacctgaaccgaatttcgacggaggagtgcctggaccgcatcgccgagtcgatcaatatcgccctcgaccgcacgcagggcgtcacggccgtcatcgagaacacggccggacaaggttccaacctgggattcaggttcgaacacctggcgtatatcatcgacaaggtcgaggacaagtcgcgcgtgggtatctgcattgatacctgtcatgcgtttacggccggatacgacctgcgtaccgctgcggcttgcgatgcgacattctccgagctggatcggatcgtcggactgaaatacctgcgggggatgcacctgaacgatacgttgaagacgctcggcagccatgtcgatcgtcatgctccgctgggcgagggtgtgttggggatcgagtgtttccggtacatcgcccgcgactcccgcttcgacgacatgccgctgattctcgaaacccccgacgaatcgcgttgggcggaggagatcgcggaattaaaacggttttcggaagaatagtcgaacggttgcgattcgctttccgccgaaacggctgtttcggcggaaatttttgtgcgaatttccatccgtaagtttgtaaatcagaagcgtattcagtatctttggataggagtgtgagtgtttcccgttccttcgaacttataaatccgcctgccataaatattttagcggtctttttacggtatttcccggcattcgaagagggggaggcgttccggagttgtattccgtctgtgcgggagattcaggaaatagctttcgggtcgaaaaacagccgggaagcgggtggctggatcattcaatatgcggggcgtcacggttacaacgcagaaacgatcaatcgtttttggaatatatacactatgatcgataacgaagatacttattaaaaacgaggccatattatgaaaaagcgactgttattatttgcgatcctgtttttcgggttgtgtggttgtgataaggacaacggagaggatgtggatccgcccggaatcggccactttgtctgggtgaatgccagcgatcatcggattacgatgactgtgaacggtcagttcgaagatgagatcatgttgcccggagagcgtatttcgaaaacgatgatcggatttattgctcttccaccatcacctgatttgtatgtaatgcatgggattgaaattgtatttgacgacgggccttacggcggtgttttcacaagaccgaaggagtatccggcggctccttacaatccgtgtaatgagaaggagtatgtatgggaggatatgccggtggaaaacgatttgtcccattgggtttggacctacactttcaccaatgccgactacgatgcggccgtagctcgcgggccgatgacggagcagtagcgttttgctgaaacagcgaaatccttcgagtcgaaatccccggcgcagattcgctgcgccggggatttctgttgaatattgcttgtttcgttggagcgctgccgataattcgccgtcagattcggtcgaggcattcgcggatcaggcgggcgctgtcgcgcacttcctcctcggtgatcgtgagcggcggcgagatgcggaacgccgtatcgcagtagaggaaccagtcgctcaggatgcccgcctccttgaagagctccatcatacggaacatcttggccgacgagcccagttcgacggccagcagcaggccgctgcgccggatttccacgacctgcggatgatccgccagcagcgattcgtagaggacgcctctgccttcgacgtgttccaccgtgccggtttccaacagatattcgagggccgccagtcccgttgcgcagcagaccggatgtccgccgaaggtggtgatgtgccccagggtaggggcggtttgcagcgtgtccatgatctctttgcgcgatacgaaggctccgagaggcatcccgccgccgaaggctttggccaggcagacgatgtcgggtgtgacgccgtacttgcacatggcgaacatttcgcccgtgcgtcccatcccggtttgaatttcgtcgaagacgagcagcgcacccacctcgtcgcaacgtcgccgcagggcttcgagccatccgggaaccgggggccgtacgcccgcttcgccctgcacgggttcgaccacgacgcaggccgtgcggcgggtgatgagtcgcaattggtcgaaatcgttgaagtcgatcgcccgcacatcgggcagcagaggccggaacgcgcccttccactcctcgccttcgggctcacccatcaggctcatggctccctgcgtcgaaccgtgataggcccggcgcatcgagaccagctccgtgcggtgggtgtatcgcttggcgagcttcagggccccttcgatcgcttcggcgcccgaattgacgaaatagacgctcgaaagttctcccggcagcagctcggcgatgcgtgcggcgtaccgcacctgcggccgctcgatcatctcgccatagaccatgatgtgcatgtagtcggccgcctgccgctgcacggcttccaccacgcggggattggcatggccgacgttgctgaccgaaacccccgccaccagatcgtagtagcgtttgccttcgggtgtatagaaaaaaacgccttctgcccgcgccacctcgatcatcatgggttcgggcgaggtttggccgacgtgggccaggaactgtttgcgtagtatcgtattcatcgttttccttattcttcgggatatttgcgtcggagaatcgcttcggcgtcccgcaccgaggcgaaggtccagcgatagaggatttcggcccgttttccggcagtcagacgccagtcgggaaccgtttcccgcatccgggacgagagcatgtagatcagaatggccgccgaagccgatacattgaggctctcgaccatgccgcacatcgggatacggagaaattcgtcggccgcagcgacgatctcgtccgagatgccggcgtgctcggtgccgaagaccagcacgaagggggaagccgcgacatcgaacgtttcgggagtcttgtcttcgcggtgaggcgtggtcgccacgatgcgataaccccgccctttcaggtcggcgatcgcctcggccgtagtgcggtggcggtgcaggtcgatccatttgtccgtgccccgcacgatattgacgttggggttgaacttgcagcgggtttcgatcgtatgtatatcctgcacgccgaaggcttcgcagtggcgcaccagcgcactggcgttctgggcatggtaggtgttctcggtgaggatcgtcatgtagcgcgtgcggctgttgagggtgcgttgcaacacctgccgccgctcttcggacatgaattccgagaggtaagccgtacgttccgcgtaccagtcgaggggtttatttgcggtatttgtcatcgtcgtcgagcattttcaggtaactttcgtagcgctgccaagatatttcgccccgttctacggcttcgcgcacggcgcagcccggttcgtggacatgggtgcaattgtagaagcggcattggggggccaggcgcatcatctcggggaagtagtgccacagctcggcatcggcgatgtcgatcagtccgaagcccttgatgccgggcgtgtcgatcaggtagccgcccgacgaaagggggtacatcgtcgagaaggtcgtggtgtggcgccctttgtgatggctttcggagatgtcgcccgtgcggatgtccagccccggctcgacggttccggccagggtcgattttcccactccggagttgccggccagcagcgtggtgtgtcccttcagtaattcccgcacggcttcgatacccgtgccgtcgagcgccgagacttcgagtacggagtacccggcgctttcataggtggctttgaatgcggctacggcttcgggatcctgtgccgccaggtcggctttggccagcagaatcgtgacgggtacgcggtaggcctcgcaggttaccaggaagcggtcgatgaactccggagccgtcacgggagagaacagcgtcacgaccagcagcgctcggtcgaggttggcggcgatgatgtgcgactctttggagaggttcgaggccctgcgaatgatgtagttgcggcgcggcactacttcgcagatgactccggcgtcctcttcgtcccgttcgcagacgacccggtcgcccacgactacggggttggtcgaacgtacgcctttcagacgcaggcgtccccggatacggcacttaaccgtttccccggcgttcgtgcggacgtcgtaccagctgcccgtcgtgcggattaccgttccggtgaattgtcgctccataattcttgttcatcgattgatacctgctctttggcccattcgagcagcgggaagagcgaatccgccagacggatcatcggacggtagcataccgaccggtcgagcgtcttttcctcggccagcgtatggtccttgttcagagattcgaacgccgagaagagcagccccaggatcagcagcgtcttggctgcggataccgcgacacccagcagatggtccgggatgccgaagcctgcgaaatgaaacaccttgcgcaacagccgtcccacgatcgccaccgcgatcagtacgaccacgaagaccgccaggaaaccgcctgccgtcgcgaactcttcgtccagatgcagcaatgcgcccgcttcggtaccgaagcggatgccgagccatgcccccaggacgatgcctgcgagcgagcagagttgcagaatgagcccctgccgccagccgttgaatacggcccacagcatcaggagtccgacgatcaggtctattacgctcatttggcttgtgtcgtttcgtttatgccggtcgcatgccttcgccgatattacctttgtccggtgaagggtccggtattcttttcggaagtactttgatccgttttcagacaactttcgcaagtcggtccgagccgcgtttttcttctacaaagatagtgaaagccgggagaaaacgggaacttgttcccggttttccgaggcgcatcctattttctgcaaagatagcgaaaggtgagagcagcgccaaaacttaatttccggtttttctgtttctgcgggaccgggattgcaagtgttcccgttatccgctccaaccgtcggttttcggtccttgttcgaacggtattttccgtaaagatacggacaaaatgcgtataatcgaaaataccgatttttttgatagagcgtcggacttgtaaagatatgtatttggtgaaagattttaagaaacagcgccgctcggttctcctctggtggttggctgtgttggatcggttctaaatataataaatataggtatttattcgctttaacggataatgtcacgaagattgacgttcagtgcattgcatatgatacacatggtctttaccgtgaggttggtgcgtccggattcgatgcggctcatattggatctttccatgtcgcagcggtatgcgagttcttgtacagtcatttgtttttctttccttaactctctgattttattcgagataaattttatctcttcctggtagctgattgtcattttaactttttcaatgaaaatttttgtcgtacaaatatttatatatatatttgcaccgtgcgtatcatatatgatacgctttcggagagttaatacgctcataataaaatatatatagtatatgaactcatttcaaaacacttatcaattatgaaaaaaacactatttgtgaagtttctgttcttacttctgtgcgggagcgtgctgactaccgcaggttgtaaggattacgatgacgacatcgacgccttgcgtaatgatgtcgaagatctgaagggggcggttgtcgagctcaacggtttcgagaatcgtattgcggcgttggaacggacccaggccgctttcgaagcgatcgatttttccgggtttgcgaaaaagagcgatatttcttcgttgcaaacccagatcgaaggatgtgtcaaagacagcgatctggctgcgaagatcgtcgcagcgatcgaatcttcactcgccgacggggccttgcaggagaacctgaacagtctgaaatcgggtattctggaagaaatagcgggtatttacgctacccaggaaacactggagagcgttcaggaaacgctggaaaatatgattgaactcaaaaaggatgccgcaggtttttcgctcgaagtgacgcagctcatcgaatcttacctgtcggacaatggtttcgaggctgccggtggagagctgaccgacagtcaggtgagccagatcgaaaccgccgcctcgcagtggatcgccgatgctatcaaggccgaactcgagacggccggcagctcgatcaataaatggctgggcgatgaactggcagtttatatggaccagatgacattgggcgacaacctgttggggcaggtttccacgcaggcgatcgcatcggttatggaggaactggacaaggaggccagtgcgctgactgaaaagatccagggactgatccgggaaaacaacggttcgctcgtgatttccaaagaccagctcgaccaggaatttcagaattatctggcgacgttggaggccaatgtcggtttgctcggtagtcgtatccagtcgatcgtttacctgccggattatgtggacggtctgatctatttcggcaacggggagcagtatatcgtgttgtcccgtgagaacgaagttacgcacgaaaccgagtaccggaatctttatttgcgtcccagtgcggaaggcgagcagatagcgactctgcgattccgtatgacgccggcccgtgctgtgaaaaaatatgccaatacggaggccatgtcgctcataaccgaagaggtcggaacgcgtgcggcggccggttttacgatcgaagagatcaaggacatcgatcaaacgaccggtgaatttacggttgtcgctacgacggattacgattatgtttccgcagaaaaggccggcaagacgcaaatggtcgccctccatgtcgatggttcggcattgagcgaaggcgaatcgaacgatttcgaaacggacttcacgtcggcttttatcggaaccgcctatgccaaagcgggtattcagatccctgcgacgaatttcgtgttggcccgggccgatgccgagaatgagggcgaatacgtcgaatataccgacgaggtgactaccgaagtaaaatatacggacaaagaggctcatggcgtgttggccggatatacggtcatgtataaggacggtgaaacgatcctgccgctcgtagaggctgccgaagctaataattggaccgtggatctggcggcactggtatcggcgtcggcggaatttaccttcagtgattcgggtagcgaggagctgtatgccgtcgatggaaaggcgcttacattcgctgttgccgagtcggaaactgcgttgatcggacagacagtaaccgctgctgcgacttatgcattgctcgacgaagagggattttcgctcgaagtgaaagccggtgccgtgaataaattctccatcgcacccgacggtgtcgaactttccacgccgaaatccgaagtgatgtggacgtatgctgccgctacctccgacgatacgtatgaggcgaagggacttgtgctgactccggataagggtatgctttctgccgttcagtataatgcgctcaagaataatgagaatctggttgtcgaactttaccggggtacggagcttgtatcggagatcgtcccgtcgatcgaattgccggctactccgacctatgatacggatgtgcaaacggtcgatttgaaattggtcggcgatctggcacagagtgctgaatatgtcgtaaaagccgtttataccaacgacgacaagaccgtcgtaacgattacgatccccgtatccgtaacgggtattcctgaaattccgatgctggagcaaacgctcgaattgccgtataatgcagcctcctcgacgggccatcacgtcgctgtcgaagaattccgtgcgctcctttgggagagtctggatcagacggcccgtgcgcaattcggagaggaaacgttcatgcagctctcctggacgagcgacatggcgaaggatgaagccggcaactatgcgacggtcggagcgagcggtaagaacatcaactttgtcttcggtaaagctgcggctctgaatgtttcctacaccgtgaagaatctctttacgactgccgatcccgtacttacgttcgaagctgtcctgcacgtgactgttacggctcccgaaatcgagttgctgcgcggatcgtcgctttcggacgacgatcgtgcccaggccgtaatgaagatcgaaggcagcacgctgcaaatcgatgcattcgacctgtcgaaaacctggtacatcgcaaaagatgctccggcagaagcaaaggtcgtttatgcgacccaggcagaaggggccgttatcacggatgcgacgctcgattggggtacctgcgacgaattgtcgatcgtggttaccgcccaggtgatgtatggtggcaaggcgttgggcgagccgaagacctttaccgtatcgatcgctgatccgatcgctgacgcgacgattgcggtcgaaaccggaaaactcgtcgccaaagtcgatgaagatgtaacgctggatgtcgctacgttgcttacattgaaggcggtcaatgatgtgaatgtatttgatggttcgacaaatgcgcagaataccaatacggcggtagccgcaaccatcgaatatggcgaggcggtggtttccatccccgacggccgtgtgaagttcgatgcggagcgtcatgttcttacggtagtcgaaggcggtgatctggaactgatgaaggagattaccgtaacgattccggtgaaatatgtctatacgttcggcgaacgtacggcgcagatcgttgtgaatgtgacgaaataaccgcatagtggacggcgattgtttcaggttttcttcctgcgggggaaggagcggaagaagataaccggaaaatcgccgggtgaaaaggctccgaatctttattgaatggcgggaccggctctattcagagccggtccctttttgatatgtttttacggaggatatgacggcaatacgagtgtaggcgacactgcggcgaagactgtggggtatgcggcggtcggatgcgaaaatcgtgaattttccggtatattcgggcgtataacctgccgatcgggttatgcactgtcggctgatgttgagtatattctgcgcctcgtgcgaagtattctctgttttttctgccgcttggaaattccggatactgatttttcggttgcgtttatccgaagaacaatcccctccgcaagaggggattgacgtatcgagttgtatgcttcggaagcgtacggtccggaaaaggtccggatttttaacgggcagatgccttttattcccgctcttttttccgcagttcggcgaaacagtggcgacagatcggttcgtaggagtcctgcgcaccgagcatcacctgtttctcgtcgctggtcaggcggtgcgaatggtgcgccaggttgccgcaccgtacgcagatggcgtgtactttggttacgtactccgccgtagccatcagcgccggcatcggtccgaagggcttgcccgtgaagtccatgtcgaggcccgccacgattacccgcaccccgctgtcggccagttgccggcagacctccactagtccctggtcgaagaactgcgcctcgtcgatgcccacgacatcgacgtccgaggtcatcagcaggatattctgcgccgaatctaccggcgtggagcggatcgcgctggcatcgtgcgaaacgacctcctcttcggagtatcgcacgtcgatgcggggtttgaagatttcgacccgcaggcgggcgaattcggcccgcttcaggcggcggatcagctcctcggttttacccgagaacatcgagccgcatatcacttcgatccaacctttctggctggcattttccaaaaacatattattactgctttgctttgtttccttattccgggcatcggccggtcgttactcttcgacccgggtgatccgggctccgagggcgttgaggcgtccgtcgatgtccttgtaaccgcggtcgatctgttcgatgttctggatcgtgctcgtaccttcggcgctcatcgccgcgatcagcagcgccacacccgcacggatgtcgggcgaagtcatgcgcgtagcccgcagccgcatctggtggtcatgtccgatcaccgtcgcgcgatgggggtcgcagaggatgatttgggcccccatgtcgatcagcttatcgacgaaaaacaggcggctttcgaacatcttctggtgaatcagcaccgagcctttggcttgggtggccaccacgaggaataccgacagcaggtcgggcgtgagccccggccagggtgcgtcggcgatggtcatgatcgagccgtccatgaagttctcgatgcggtagtgctcctgttggggaatgtagatgtcgtcgccgtgctgttcgaagcggatgcccagacgggcgaactgggcggggatgatgcccaggttctcgaacgaaacgttgcggatcgtcagctccgaacgggtcatggctgccagaccgatgaagctgccgacctcgatcatgtcgggcagcagcgtgtgttcggtgccgtgcagctcccggacaccctcgatggtgagcaagttcgaggcgatgcccgagatgcgtgcgcccatgcggttgagcatcaggcacagttgctggatgtaaggttcgcatgcggcgttgtagatggtcgtgaaacccttggccatcacagccgccatgatgatattggccgtgccggtcaccgaagcctcgtcgagtagcatgtagcatcccttgagttccttgcagcggacttcggagcaggcggccgcagtgtcgaaatcgagcgtggcgcccagcttctgaaagccgatgaagtgggtgtcgagcctgcggcggccgatcttgtcgccgcccggcttgggcatgtagcccacgccgaaacgcgccagcatcggacccagcagcatcaccgaccccctgaggcggctggcccggcggcagtagtcgtccgagcgcaggtagtccgggtcgatgtcggcagctcggaacgaatagctctcttcggacaggcgctccacttcgacgcccatcgcctgcagcaactcgatgagttgtatcacatccaggatctgcgggacgttgtgtacgattaccttttcctgcgtgagcagcgtggcgcagaggatctgaagcgcctcgtttttggcgccctggggcgtgatttcaccgcgcagccggcggccgccttcgactttgaatattgccatgttcgatctgttttgagcgaatgggggaggcgaaccttacggcaaacgccgctccggatttcccggaatatctcccattattttacaaatatagtgaaaaccgtgcggcgggccaaatttgtccgggccgtcggggtgtattttctattccataacgaggggtgtaaaaggaagcggcagtcgcatttatgcgaacttgcccgaatcgcattctgtcttctcctacaaatatacggaataggtcggaaatcgaaaaggggaaaactgaaaattagaatcggattgataaatatcatcggccggattcattgcccgtgcttttagtctgtcatatgccctctttcgttgccggattaaccgctgccacaggtacgggagatgtgtcccgtaaaacgggattcgaggcgggtgatttgtcgtcacaggcagtgcggattgtgtgtttgcggaaaatcggtggcgtacttacctccggggtactcggagcggaaggacgcaaagtcttcgagtgcgttgcgttcgcccggcgaggcggtaaaccaggatcggatgtgactcttttgcccttttctgcgaaagaaaaggcgtgtgaactatgctgggaaccggtaatttttgccttgcagcttttacggccttcttgaaaaaaaggctgtgggcactttcactttgtcgccggaaaaaagagggacgcaccgcttaaaagattgggtcggaaagaagcgtttctaccgactgaacagcaagggcggtgcatcaatgcaccgcccttgctgtggcttgaatcccgaaggaattaagcgtacttgaacgtcgattcgtccgatacggtcagcttcttgcgacccttcgcacggcgcgcagccaaaaccttgcgtccgttggccgtagccattctctgacggaatccgtgcttgttgattctcttccggcgcgaaggctggaatgttcttttcattgccatagatctatcgtgtttttattgttttagcgtacaatgcggagtgcaaatgtataatctttttcttgatctgccaaaaatatcgtaaatttttcttcttcttcgtttcgggtgcgactccgcacaatccgctttcgtcccgtgtcttacgatcggttaccgttccggtgccgtgtctttgaagaggtccgcctcgccccgttcgaccttgccgtacatgtcggccagttcggcgatgacgggagaaacgtattcgatggtgtcgctcacggcgctcttgcctccttcgcccttgatgcggtagagcatcgcggcgtaaagcgcccggaagcagagttcgatatcgctcatttcgcgccccagcacggcccgcagacgcggcagttcgggttcgagcctggcgaaagtctgacggtagtgctctccgatcggcagcttcatcagttgcaggtgcaggtcgttcaggtcccctatcagatgcagcgtatgctccaggtgtcccttttcctctttgccctcttcgcgcagcaggttggcgatgtccatgtaccagagcaggtagttgtggcgttgtccctcttcgattccgcgcggggcgataagctgcgagtagatggcctcggggctgaactggagcgcccggagcaggtcctcgatctgccagaggtagagaatgtattcggcgatgttttcccgccgtttggccagtgcgatgtccatggtgaatttcgttttgcttcccggcgggaggcggagttacttgattttgttgagccactgcagcggcccgtccttgtgttcgaggaagtagcgctgcgatttgagcaggttgcgcgactgaagcaccatgctcttggtttcgttcaggatcgtcaggtagaggatgctggccttggtgttggagcggttctcgttgatacgcgtcacctccgacttgatggcgtcggcgatcgcctcgaaaagccggtcgcgcatttcgagcaccatgtccaggtcggagaagtcgcccgtgcgcagcatgttgttgatgtggcggtagatcgactccacttcgtcgttgatgtgcatcaggtcctcggtctgctctttcgagagtccctcgtggttgttgtcgatgtgttcgaacgccggacgggtgatgtgcgccagcgccttggtcatttcgttcagatagtccaccacctgcacgtagtagtgagccgtatcgatgtcgcctttctgcagtttgcgcagggtgggcagcagggagtacttgcgttcgcgcgactggtagaagagttcgttggattcgcgcaccatttcgcgcagtaccttgcggttctctttgaaaacggcgatcagcgtgcggtcgtagatgcgggtcgtgcgctccatcgtggcgcacacttcctgcgtgatgttatagatgatgtcggagccggtttcggcagctttcacggcggcggtttcggcagctttgttcttcttgaagaagttgctcttgacgagcatgtagccgcacagcagcgtggtgacgacgaaagcggcgatgccgccgtagatcagtatgagccccatcgccagggcgatcaggaagccgccgacggccgtgatgaaccacccggccacgacggtcatgacgcccgagatgcgatacacggcgctttcgcgtccccaggccttgtctgcgagcgacgatcccatcgctaccatgaagcagacgtaggtggtcgaaagcggcagtttgagcgacgtggccaccgaaataagcatggcggaggtcgtgaggttcaccgtagcgcggatcatgtcgtagggggcgccgctgtgctcgatgtcttcgtactggaagcggctgctgatcttgtcccggattcttttggggatcgtgcggtcgatcgcgttgcttgcattcagggcggcccgtacgatggtgcgcgagaagagcgacgagccgtactgcgtctcgctctcgccctgcgtcgaaagcgaaatttcggtttcggtgacgtgcatcgcctttttcgaggtccagagcgtgacgatcatgatgacgcctgccgtcatcagcaccaggaaattggccggaacgctggcgttcagcccttccatcagaatcgtgctgtcgccggcatgacgggcgatgctgtatgcgtcgaatccggctaccgggacgccgatgaagttcaccaggtcgttgcctgcgaatgccagagccagagcgaaggtgcccgagaggatcgtaagtcgcagaatgttgattttcagccgttgcaggaagaagagcagcaggctgccgacggcccagcacaaaaagagggagagcaggatatgctggtcgatccattcgatcgcggcgcttccggcgagcggggttttgagtcctttgaagacggcgaagtagaggatcgccgtgaaggaggctccgcaccagaaggcaccgaagcggcggaacatcgccgtatagcggaacgagaagatcagacgggagatatacatgattagggtgccgaacgtgaaagcgatcactacggagagcagaatcgccgaaacgatacccatcgcgcggcccgtgttgatgaaatggttcaggtcgcccatgccgagggccccgtcgttggagatcttgtagatcgaaacggcgacggcggcacccaacaggcagaagatcagcgatacggtcgtcgaagtcgggagtcccatcgagttgtagaggtccagcaggatgacgttggcgaacatcacgcccatatagagcatcatcacttcgtggaaggagaaaagccccgggttgaacataccgttgcgggccacttccatcatgccgctcgaggtgaccgtacccaacaggatgccgatcgaggcgaccagcagaatggtcttcatgggggcggctttcgaaccgatggccgagttgaggaaattgacggcgtcgttggaaacgcccacgaaaaggcccgaaacggccaggattcccagaataacgacgataacggtgtagatttcgctcatgttcgggattttttacgcaaattttcagacaaatttacattaaaaatccggatggaccggttgcggcggtcattgttaacattaaattaacatggagtcttttttacgtgctttcggtttcggagtttattatccggacgatccgcacacccgcacgccgggtgtgtggatcgatataccggtacatgccacggtcgaaggtctgcataccggatgcgatgaaattctggaaaaagccctggagatggtccgtacgggcgaatacgactcggcagccgaaaagtgattcgcatgcgatgaagatgaaaaagaggggccgtcggcggccgaaccggaaatcggagcggtaaggtaccccaaaagtgccgttcgatccgtcttttgcatttccgaaatgcggttttagtagccctctttgggtgtgtagcggcccgaagctcccttcgtggaggggagccagggaaagggtagaatttacaaatgcggcctgagccgcgaataggcgaccgtcggataatggtatcttgggacatatgattacctttcgaaactatgattcttggcaatttcggcgtacacagcgacatgaaaaagggttgtctaatgcatatagacaacccttttttgtaaaaatccgccgatttactcctcgtcggtgtcggtataggccttcagcagcttgtcctgcacgtcggtcggaacctgttcgtaggaggcgaatttcatcgtataggtcgcggcacccgaactgagcgaagagagcgtcgtcgagtaacggtacagttcggccagcggtacacgggcgttcaggcgatcgaagcccttgtcggactccatgcccataatcatcgcccggcggttttgcaggtcgctcatgacggcgcccatgtagtcgctcggcgtgaggacttcgacgtcgtagatcggctccatgatcttcggtcccgcgttgcggaacgcctccttgaaagcgttgcgggccgccagcttgaacgagatctcgttcgaatcgaccgggtgcatcttgccgtcatagacgatgacgcggatgtcgcgggcgtaggaacccgtcagcggaccttcgtccatcttctccatgatgcctttcaggatggccggcatgaagcgggcgtcgatcgcgcctccgacgatcgccgtatagaactgcagcttgccgccccagggcaggtcgtactcttccttgcccttgatgtttaccgccagttctcccttcccggggaccttgtagctcttgggttcgggcatgccttcggtgtaaggctcgatcagcagatgcacttcgccgaactgacccgcgcctcccgactgtttcttgtggcggtagtccgcctgggctaccttggtgatggtttcgcggtaggggatcttcggggcgatgtaatcgtattggagcttgttctccgaggcgatgcgcgagcgcaggatgttcaggtgatgttcgccctggccctggatgatagtctgtttgagctccttggagtagtccaccaggatagtcgggtcttcgtatttggcgtcgttcaggagcttgcccagtttttcgtcgtcggcctggtccttggtcttgatcgccgcacggtagcggggttcggggaagacgatcgggtcgatcgtgacgggcgtcccgggcgccgagagcgtgtcgttggtgcgcgtgcccttgagcttcaccgtgcagccgatgtcgccggcggccagttcggtgaccttgatgcgattcttgcccgcgacggcgaagagctgcgagagcttctccttgttgcccgtgcgggtattcaggagttccatgccttcggtgagcttgccccggatgacgcgcaggtaggatatttcgccgatgtgctgttcgatctggcttttgaagatgaacgctacggccggagccgcttcgtcggcccggatctcctctccttcggtcgagaggaaggcgggggccttcagcgggccgggcgctacgttgatgatgaactccatcaggcgcttggtgccgatgtcgcgcttggcactgccgcagaatacgggcatgaccgcccgacgggatacgccgattttcaggcccgaacggatgtcgtcctgcgtcagtgtgcccttctcgaaatagagttccatcagggcgtcgtcgtattcggcggctgcctcgaccagctccttgttcagagcctgggccttctccgcttcttcggccgggatgtcgagctcttcgcgggtgccgttctcatccttgaagcggtacattttcatcagcagcacgtcgatgaaagcatcgaatcccgggcccggattgaccggatactggactacgacgggcttcacgcgcgaggccgcacggatggattcgagcgtagcgtcgaacgacgccttgtccgaatcgagctgattgacgaaagcgatgagcggcttgttcagcacacgggcgtaacgggcctggatctcgctgcctacctcccagccgttctgggcgttgaagaccatgacgcccacgtccgccaccttgaaggccgagaagaggcttccgcagaaatcgtccgatcccggacagtctatgatgttgagcttgcgctccatgaattcggtgaagaggatggtcgaatagatcgagcgcttgtactcgtgctcgatatccgtgttgtccgagagcgtgttgttcgcctctatgctacccctgcggtcgatgaccttaccctcaaaagccatcgcttcggcaagggtagtttttcccgtgccgggagcgccgataagaacgatgttcttgatttctttcgctgaatagtttttcatattcgttatctttttataaggtttttgcgataccgattcgtcctggcggaaaatccgccggtgattttcaaacttcgccttataaatatacgaaaaaaatcgatcggccaaatttccgggcataaaaaatcgcccgaagaggggcgatttttttaatttttcaaaaatgtcgaacctgaatcccccggcgggcgtttgtccgggtgttccggtcggcggcggatcatacttcgacgccggtcagttcgcggacggcccggcgcccctcgtcgcccagggagagcgaatacgaattgacgaagaagtcgatgtggtggtcgatcacccggtcgtcgagctcccgggcgtgctccttaatataggtgcgggattcctcccggtgtgcgaaagcatattcgatgctcgtgcggagcaaccgttctatttcgcagcgaagctcttccggcagtgtccgtcgggcgacgatggctcccagcggaagcggcaatccggtgcgggattcccacaactctcccaagtcggcgaccagctccaggcccagtttccgatagacgaaacggccttcgtggatcaacaccccggcgtcgtactccccgcgtgccacggcgggtgcgatttccgagaagagcaccggctttttttgcgtgatcgacgggtagaggcggctcatcagggcgttggccgtggtgtgcatcccgggtaccgcgacccggcggatcgaatcgggaggtgttccctgccgtgcgacgaaaaccggtccgttgccgcgtcccaaagccgaaccgctgtccagcagggtgtagcgggactggatttccggcagcagggcgtagctgattttgcttacgtcggtttcgcctgcttcggcacggcggttcagttcttcgatgtcgtagtaggcgacttcgaaggttagctccccgcagtcgatgcgtccgttcacgagtgcgtcgaacatgaaggtatcgttcgggcacggagaaatatgtaggcggatcgtgcgtttcaaaacatcgaatcgattaattgccgttgccttgctgtgtcccgtttttcttgcctccgaagcgtcccagcagccagccgccgccgaaaacggccgcgaggagcagaatcttccacagctggttcgagagccagaaatagatgtttttcgagaagacgacgatcagcacgaaggccacgacgatcagaacgatgtaaataatccactttttattcataatccgaaagtattcgaatgattgtttttgctaatttttctgcactttcctcgatgcgccaggccgaacgcgggtcgtcggtatagttcgacacggcccgcacctcggcgccgggcactccgaatgcccggcagacggccaggaaagcggctccttccatattttcaatttgcgtgccggacgctgcgactcccgtgcggttggtcgtattgctttcgacggtccgcaatcctgccggaatgaagtcggccgcatagcggacggcgtatttcccgggcagttcggcgattcgctcccctgcgaccgcgacgacttcgcatacggctaccgaacggtcggaagctccggcgatgccggccaggatcagtcggtcggggtgttcctccgcgatgatccgggccgtcgctgcggctgcggccgccatgccgactcccgcgatgcggaccggcgcatcgggacatgcggcccgcagcggggccgcctccgtttcggtcgggatgaggatcagcgttcgcattttattaggaggattagcgaccgacgacggcttccagctcatcgaccgtgatggggatgcgcttgtcgcctccgatcatgcgactgcccgtttcggtgacgatgatgtcgtcctcgatgcggatgccgccgaagtcgcggtaggcgtcgagggcgtcgtaatcgacgattcccttgtatttgccctcggctttgcatttgtcgatcagcgccgggatgaagtagatgcccggctcgtcggtcatcaccgtgcccggctcgatgcgccaggtcgaacgctggatgcaggtgcccgacttggcggcctgctccgcgatttcggagaaatcgaagctacgttccccgatggcttcgcagtcgtgcacgtccaggcccatgccgtgtcccagtccgtgaggcatgaagagggtcatggcgccggcagcgacggcatcttccgccgtgccgcgcatcaggcccagcgagatgaggccttcggccaggatgcggtacgaggcgttgtggatatccatgtacggcatgtgaggggcgatcatggcggccacccggtcgtgcgccgccagcacgatgttgtaaatgtctttttgtttctgggtgaacttgccgcttacggggtaagtacgggtgtggtcggaacagtagtagctcaatccctcggctccggcgtcgcacagcagcaggcggccgttttgcagtacgccgtcgctgtgcaggttatgcagcgtttcgccgtgctgcgacacgatcggcgggaacgacacgccccgtccgaatgctttggaaatgccttcgatcgtgccggcgatttcgcgctcgacgatgccgggacggcacatcttcattgccgtagtgtgcatggcgtagccgatgtggaacgatttttcgagctcctcgatctcctcgggacctttcttttcccgcatctcggctacggccatcatcaactcgaccgacttgtgatcgtgcagtgcggccggtttgagtcccagcaggtcggcgagcagcagcttggtttcgcctcggtaagggggcaggtagtggatgcggcgtccctggacgatggctttggtcaggtgcgttttcaggtcggccagcgggaaggtgttcgaaacgcctgcttcggccccttgttcgcgcagcgaaggctgcggccccgtccagatgatgtcttcgaccgtgaagtcgtcgccgtacagcgcaacctctccggagtcggcatcgatcaggccgaccagtgccggggtgttgagtccgaaataatagaggaacgaggagtcctggcggaaataataggcgttgttgaggtagttgttgggtgtgagcatattgcccggaatgaggatcaggccgctgcccatcttgccgcacaaggcgctgcggcgtcggatgtagatttcttttgcaaacatagtcgtatatttttataattttccggcgaaacggttcgttcttcgagaggacgggcccggcttctgtccatccgcgatgccggagcgcacgccgttcgaacctaattttggtaaaggtagtgaaaacgaggacagaatagaacaaattcgttcgttttttatgtcgagtgcatcctatctttctgtaaaggtagtgaaaaaatcggtaattcgtgtcataaaacgactccttgtgacgttttattaaaaatagtgtgtcgaaacggcttcgggagtctatgccggttttcgcaaatcgcttccgattccgccggaccgaatgggcgacgggacgcagggaacgggttctgcggccggatcgtcagtaaaaatggagcggattttagatgacctattaaaaaaaatactatatttgtcccattggtctgttgtcacgaagaaaatacccgttcgtggcattttaatgtaaatttcaaaattattgaactatgaaaaaaatcttttgtctgacgattttggctgtcctgtgcactttcggcgttgcatcggcacagcagtttcccagtgtgcagatcgaaacccaggatggcaagacgatcgacaccaaaaccctgatcgacggcaagaccccggtcatcatctctttctggtccaccacctgcaagccctgcatcaaggagttagacgccatcagcgagcagatgatcgactggctggacgaagcagacttccgggttgtggctgtttctgtcgatgattcccggtctatttcccgagccaaggctctggcggccagccgcggttggactaccgatttgatggtggcctacgataagaaccaggacttcaagcgtgcattgaacgtgaatgtaactccccacgtgttcatcttcgacaaggacggaaagatggtgtattcgcacacgagctatctgcccggcggtgagatggagctgattcagaagatcaagaccctgcagtagtcctgtaattccaaattgagcgacgaatgaagcgacttttacgaatcacggtcctgttctccgtaaccttgttgtggtggggcgaaaaggggtatgctgcaactccggcgatggacgcagcagagaaagaaacggtttccgcaactgttgaagcggaggcggataagaaggacccgaaatcggataaaaaatccgacgagcccaaacgcaagcggaatttgggtcatttgagcggcagtttcgaaaccaatacgatctactatgtggaggacagcaagaccggtgcggtcgttcctcacaacagttacggttcgaacaacttcctgaagctcgactaccagttggggcgtttttcggccggcgtgcagctcgagtattatccccatccgctggtcgggactccgatgcagggttatgaatatgtgatggaaggtttctcgatcaataacctgactgagaagtatatctcgtggacggaccgcaactactcggtgaccgtcggcgacttttacgaacagttcggcagcgggttgatcctccgtgcttgggaagaccgggctttgggcttcaacaattcgctgggcggtgcacgggtcacgttcaatatcacgggtcacgttcaatatcaaggacatcgtggaaggtaaggtgctgtatgccttcccgcgtttcaacctgggatacctgtcgacccagattgccggtggcgacctttcattctcgctttcgaatgccatcggcttgctggatcaccggctttcgctcgagggcagcatcgtcaaccggcatttcaagaacctgccttcgtggtacaccgagtatcgggacgattatgatttcgacctttcgaagaacgtaatcagttattcggggcgtgtcaattacgagtacaggggactgtcggccaaattcgagtatgtaggcaaaagcaaggatgtctatctggacaatatgaccggtgaagaggtgttcaagcgcggtgacgcacagttgttcgaaatcggttacaccggcagcaattatgctgtgatggcgcagttccgccgcctgaactacatgcagagccagctttaccggcccgacggcggaagcggcagtttgggcctcctgccgggcaatacgatcaattacattccggccctgagtccgcaacatacctatatgctggccggattggatcctaacagtccccagcaaaacggagagatcggcggtcagatcgacgcgttttacacgttcaggcgcggtacggccatcggtggcaagcgcggattgaagatccatgcgaattatgcccgctattattccatcaacgggacgatgagtaaacccggaaccaatttctactaccgggatttctcgttcgacatcgataagagttggaacagcaaactgcgcacggttcttttcgtgtcgttgcagaagaatgcgatgcacggtggggaagacgtcatccgccagaatgttttcgttgcggacgtgacctataagtttacgccgaaattctcgttgcgggccgagcttcaatatctctatgcgcctcatgcggagggttccaaagaggtggatggtgactgggtggccggattgctggaagccagcttcgcccccaagtggagtatcttcgtacaggatatgtacaaccacggcggttcggagatcaactactactcggcgggcgccagcttcacccactcgttcattcgcatcgcattgagttacggacgtaaccgcgcagggtatatctgctcgggcggtgtttgccgcgagatgccggcttatacgggcggtaatctggcgatgacgctgactttctgatcgtgaagattctgatcgtcgaaaattcccgtatgtttgaaaatctaagaaagagaaaaatcaaccaaaattactgaaattatgaaaggacgaactaaattttcaactatttcatcgcctgcattgcgacgctctctctggcgactttcgcagcgtgcagcgacgatgatccggagactccgtccggcaaattggtgctgacggcgagcgcttcttcttttgtcgccggtgaaggcaacgtgactttcatggtgacgtatgacggggaggatgtgacctcgcaagcagcgattaccaatgtgacgaccggtgaaccggtggaaaacgctgcgtggaccacgacagagatcggcgagtacaagttccaggctgtttacgacagctatacttcggatcccgttacggtaagcgccatagacaaaaacaaagacaaagacaaagagttctatcgctacgtactgctgctcaagtttacgtatatgacgtgcgggaattgtgttacggcacaaggatatttcgatgcgctggatgaagcggaccgtgaccattttctggtcgttgccgcccaccagcctgaaggaatgccaatggatccttattggtgttcggaggggattagtttgaagagtaagatgaaagtaggtgtgtatcctacttggtcttataatttcgaggatttggttgtcggtatcggagcgggtgccatttccaaaacttcgatccggcagcagatcagtcatgcggagaaaacctatccggccgtttgcggtgtgaaagcgacctccacgctcgaaggttcgacggctaagatcgaggcgaccgttcagttccagcaggccggtaattacaagatcgcttgcgtgctggttgagaataatattgaaaacaaggagacgtacaatactttcaaccatgttttgcgtgcggcccagaccgatatggagggcgatgccgttacgccggccgtaactgctccggaggagcgcacgttcaatttcgaggcgacgatcggggaggactggagtgccgagaactgcgccttcgtggtttatgtattcaaagaggaggccaatggcaagtatattgtcaataacggtgctgaatgtactgttgatggttctgtggattacagatatgagttgtaggatataatttgtataaaaaaatcctttgctagcaacagtaaaggattttttttatatcttgcaatgtgttaaaactttaattattgttagaagtttttttgaaaatgttgaattgtaagagaatattatctttcaatagataatgagtaacttatacatttttacttttgatttttttatccaattttaacctttaatcaataataactatgaaatggcattttaatttctttagatttgctgtcatgtgtgcggcttttgttgcccttgccggttttatggcttgtagcgacgacgattccgaatccggctcggaacttgtcttgtcggcgagtacctcttcgttagcggggggggggcagcgtgacatttacggtggcttttgaggacagggatgtaaccgccgaggccgtgattaagaatgtaacctctggctctgaagttcagaatgccacttggacgacgaatgtggcaggtacctatgagttccaggccgcatacgatggcatgttgtcgaacgtcgtttcggtgaaggtagaatctgactcggaatccgatgctttttaccgacatgtgttgttgacgaagttcacggcgacatggtgcgggccttgtgcgcaggcgcaacggtatttcgagcaattgaaaccggaagaatccgaacgtttcctggttgtcgccgcacaccaaggggaccgattgactgtcccggtagggagcgcactcggtgcgaagttggggtatcagtatgtgccgacttggaattatgattttagaacagtctttgaaagtgtaggtacgggaggtattacggcgacgtcgatccgtaaccagatcaagagtgctatggaggagtatccggccgtttgcggtgtgaaggccgagtcggaacttgacgggcagacagcaaagattcgggcgacggtaaggttccaacaggccggtaattataagatcgcctgtgtgcttaccgaaaatgatattcagaaaactaacaatgaaacgctacccgttttcaaccatgttctgcgggcggcacttacgaatatggaaggtgatccgatcgctcctgccgttgcggaagccggtgagcgcagtttcgatttcgaggtctccctgaataacggctgggattctcagaattgcgaatttgttatctacgtgttcaaggaagaggaggacgctgcctttgtcgtcaataacggggccgtatgtcccgtcggcgggaaagtcgattataaatatgagtccgtcaaatagtttcggttgtatatgggaagaaaacagaaaagccggggtgttctcggcttttctgttgcggatgctctgtcgcattccgaatatatgtaaaaaatcctcgaccgtgtggccgaggatataatcgctgctttagtgtaagcggtgttatttgaggtccttggctttgaggcggacgatttttccatcccggacaacgaccaattcgccatcttcttttttgactttttcaatcaaacgcttacgggcaagcaaaattccggcgttgattttctcctgcatctgcttgatctcaatttcgctcataatctgcaatcgttttataggataacgtatcttcgatatgggttgttatgtcttttcctcccaatgcgatgattctgatctgttcgtctgccgaactgttgtcgtagatcgcccaatagttgcaaaggggaatatagagagcggtcaaattctttatcccattggcatagcggcgacgaatcacatccgaaggaatattgtggcctccctctcgcacacgggtcgcgacgcgttcgatagcctgttcgggggtcggcaaccaaaaatagagcagcgtcacgaagtaaccttttgcttgtgcccgttctatgaactttacataagaacgcgtggacaatgtcgtttcaaaagcaaaatccgacccttcggacagcaggtcgtccatccgttgaagcatcaatcgtcctgcttcgatcgccacgctttccgggttgaacggcgacaggcctttcgctatttcatccgcattgacgaactccttgcagccgagcatttcgggtagtacggtataggacgcagtcgtttttcctgcaccgttgcagcccgctatgatatatagttttggcatatcgtatggacaaagatagctaattttacgattacaggctgttttactgtgataaaataagacgaatcagccccaaaggtcaatttaggccttctgtcaaagtttgttcgttggtcgttctatgaattgtttcggatattgctcgttggagccatccggtgggaaacgaaactctttctgcttgtcctctaacgatgtatcgccgaatataactgtatcgcttttaatatgggcttcgaaaagattgaggtatggttcatctgtgaatccaggccatttttgtaggtcctgtcagcttttttgaatggctttgattttcatttacttgcgtgttgtgcaagcaatcgagggtagcagattcggggtacaacaatacagcacaaacagcttttcaaccccttttttcgctgtgcagaaacaaaaaagccagcagttacatttctgtaagtcgctggctttctgagccgaaaccgagatttgaactcgggaccccttcattacgagtgaagtgctctaccgctgagctatttcggcctttcgctgaaagtcagtcggttataaagtttgaaaatgtggatttgggcgcaatgtgtaacattatgtgtaacatgacggcctgcgttgtttgcagttaaacaatattgaattagttgattatttgataaatagaaaaagtgacaaactatgtcgaaagggtaattatatagcccctcgtttttagtctgtcacttgtcattgtcaaaggaaaaacgccgcattttttcgacccctctccttaacctttatagatacgatgcaattcaactccaccgaattattttgcaaattgcatcaaatagttttcgcagaatccagctaacgggaatttcaccatctcgtcccgtccgtcgggcgtggtgtaatgaaataatatagtgttcgctctgacaaggcagtcgaataaatttaccgtttcgctcatgccctccatcttcatctcgttggcgattattattcctattatatcgtttatctcttcaaggtcgcttttccacccgattattcattgtttgttctttacaagtgcgatttcaacgggtttatttatgtccgctgtttcgggagagaaaacaaagtaaaatatttcgggataaatctcattttgaggctttatgacaattaagcctattccctctgtcttgctccattcgaccaacttgcaaatagcttgtttatcctctcatgttttggtcattcattccgttttaggttgtttgtatctgttcattttagctaaaatttatattgttatttatctttataaagataagattattagtgaaataaacaaaacaagaaagtgacaaactctgtaaaagggccttatagattaaccttttcacaaagtctgtcactatgtaggtagtatgttatttgggtatcttactcactaaaatcatatcctataatggaatcagcataattgcgccaattcgtttttgttttgtatttatcaacaacagaatgcggaacataaattttaacaggtttataaagtgcatcatcccctaatgtcggcggggttaaacttttacaatagaaattcaaatcataacatgatgcaaatgcagattggcctatttctgttaccccatttccaattgttacatttactaaattgtcacaaaaactaaatgctgatttgcctattgttccatttgtgacagtaacagatgttagtttcttacttatagtaaatgcaaaatcttcaattgtaagcacgctttgaggtatggtaatattggacagatttgcacagctgaaaaatgcgttagcaccaatagaaatcaatccgtctggtaaaattatagaagcaagactactatgacttatgctttcgggacgacctggcccaattcccgttatgtttggatagaacacagatttgcctatcgtttttacatttttcgggataacaatagacactaaattatcacaatgatagaaggcattatcgtcaattgccgttaagtttgtgaaatattcaagctctttaaatgaaataatgtctgtattttccttaaataatgtccctatggatgttacagccgccgcttcttcgtatgataattcaccatccccatttgtatcccagtttttcaaacaaactaactttacgtttatatcttcaaacgtgataaaatttgaggattgccccgtctttgaaatggtgattatcgtcccgtctgccaattcaaagtaaacattgttctcatcctgcgtgattttgatgctatctgcatccttgccgtcctctcccgtagctttgcctaattgcgtccaattcgttccgttgtcataggaaatccaccaatatccctctcgaatttcgagtttaggcgtaactccgtctgaaccatccgcgccattattaccgtctgtcccttgtgcttttatcttctgtccgtccgcaacgataaactcaccgtccaacgtccaataatagatgccgtccgtgtctttcttcacaccgataacgggagtgtttccatctgcaccgtctttaccgttgtaaatcacaatcgggttactcttggcaaacttaatcgtgtagcctaccaccttgccgttctcggtcagcgggtctacactcgtaatataatcgttgttttggagtgctgttacaatcgtctgcaatgctgaaagattggtattcgtttcgttgcaaagacgctgtaaggcttcaaaagcagaccatgtaggcagtttgatttgcgtaccgtttgataaggtgaaaattacatagtccgtgctggtttcataatccacgcccgaaaacatagaatcgccaccaacgccatcttcacctgttgctttacctaactgcgtccaatttgctccgttatcataggaaacaaaccaataatcattttcgattttgaattgcggggtcgtgccgttggttccgtttgtgccctcggcttggatttttccaccatcgaccacgataaattcaccgttcaacgtccaataatagacaccatcagtatctttctttacgctgatagtgggtgttatcccatcttcaccgtcttgtccgtctttaccgtggtagatggtaatagggttacctttgctgaaagtaattgtatagccgatttctttgccgtctttcataagaggtgtagttcccgtaacatagacgttgttttgtaatgctgttacgatggtttgcaacgatgaaatattcgtgttcatctgcttgcagagttcctccaattttgcgacacggttttccaatccgtgcacgctgttccaaaggtcatcatcatcgtatttacacgatgtgagcgcaaccaccgcaaataatgcggcaaaggccaatagttttttcatagtaagatttatttaagttgaacaagtgtttcaaatcttactatccgtccctcgatagtggcttatgtgcaaaagaaagcgcaggactgaaagcctattatagttaagcgggttctgacaaaaccttgacaatataataagcaacagccccacgcctatccgtaaggatatgacgcggtagatgttcgcctattctcttgtcttttgaactgtcagattcgcttaacgagaacaagctacactttccgtgtattcaatatgttactgcaaaagtagcatattcggcggaaattgcaaaacatcttgccctttcgggtgctgttgccgtatttaattgtgcaaagttcttgaaaacaaagtttctatccaatagttgggagtatggaatcgaaactttgttagttgtaagttgggttaatcttccccgcagatttcttgtattacgccatccatgtaaatcgcctgtccgctggattgcctgccccaccaatagcaaccgtattcctcgatgataacctcgccttgctctttcagtcgttcggccagccatgaatcaatcagccaccattccatgacatcatccgcgaacggataaagatattcttcggaaataaggtttgcccgtatcatttcctcgataaccgtgctttgattcttcaaaacacttcgctggacgaccgtcgagggcgatgtcaagactgcctcggtcacctgcacgccggaggtcgatcctgcgttgcaataaatagccgacaggaacagcataatataaggtcgaacttcaatacgggctaaaattcttgccgctccagtcctgtttcgcaagaaagacgctctagacaaacgtttgatccattgcaatttcggatggggagggacagccaacgggtattattactacggagctttcgatctgcgcaacggaccggaggccggttgttttgaagaatcaaagcacggttatcgaggaaatgatacgggcaaaccttatttccgaagaatatctttatccgttcgtggatgatgtcatggaatggtggctaattgattcttggctggctgaacggctgaaagagcaaggcgaggttatcatcgaggaatacggttgcttctggtggggcagacaatccagcgggcaggcgatttacatggacggcgtaatacaagaaatttgcgggaacgattaacccaacttacaactaacaaagtttcgattccatactcccgactattggatagaaactttgttttcaagaactttgcacaataaaagcacagcaaatttccatagagtgttctgtcttttagaaacattttctatctttgtgtcgttaccgaacaggtagcagacatattagtaacgtgaaagtgtttcgcgtttactctcaaatagaaatctgacagtttcaaaattagcacgagagtaagcaagacagacactcttcatttgtgtagctatatatcatcccgatatatactgccaagtgtggagatttgcttatttgtgctaaggttttgtcagaacctctatttggataagcgaacaactccacactttctttttgcctataacccaccgcagtaggagttgatacggatgtaatactcattttatgggtaaaacaataaatatcaacaatctatccaaagaggaaataaattccttttatgattttgtttgcgattatgaattgaatatcaaaaataaatacgggaattataacctcaatgatactaaattaatcgccttttgtgcaacgaatcatattgcacttaaaaataagaggtcaaaactaccttatctcttttggttctcaacacatcaagataaaagaacaaaaattaatgataaggcccatcatttaatgcgacatattagaaatgcttttgcgcatgggcttattaagaaagagggcaagaatttcacgttccaagactattccacaataggaactcaaacaatgggagggcatattcgttgcgacttattttgggcaatgttggatttattgaaacacactaaattataaatatcatctacttatgaaaaaactattatccttactcatgtgtggcttattgctatttggttgtggcgataagtacgacgacagcgcattgcgcaatgatttgaatgacctcgaaaatcgtgtggccaaactggaggaactctgcaaacagatgaacaccaatatttcatcgttgcagaagattgtagaagcattgcaggataatttgtcgatttccaaagttgaacaaatatccgatggttacattatccacttttcagatggttctactgctacaattaaaaacgggaaaaatagcgaggacgctcctattattggtgtgaagaaagacacggacggcatctattattggacacttgatggtgaatggctgaccgatgaaaagggaaataaggtaaaggcacaaggaacagacggcaaggacggagttgatggcgaggatggaaccaatggcaaagatggcattacaccacaactgaaaatagaaaatggtcgctggatgctttcaatggataatggtaaaacttggacggatatagggcaagcaacgggagcagacgggacggatggagaagatggtgtcgatggcaaggacggaacgaatggcatcttcaaaagtgtaacggaagataatgataatgtctatttcacattggaggacgattctgttatcacgattcctaaaagcgataattcaaagtttgcaattgcattcgatacgacggatatagccattctcaatggaggcgagagcaaaacgatttcctacacaattacggatgcaaccaaaaatacggttgtcaaagccattgcacaggatggatggaaagtcaaggtagatgcgacctctacggataagggaacgattacgattacagcccctaatccaattgtagaaagtgaaatccttgtgtttgctaatgacggttcctatcgtaccgttatggtgtcgctgaattgcatgcaggggcaaatcaatatagcagataactctattaatgctacttctgctgggggtacacaggaaatcaaattgacaacgaatttggattacaccatagagattcctgaagatgcccagtcgtggctatcgctggctcccgaaacacgagccttacgggaagatacgattgtttttgaggtaactgctaacgaggggatgcaacgctatacgacggtagcattgaaagatgaacaaggcaagatattgcaaacaataatctttcgacaattgggaacgtgtaccgaggttcatgtcgaaacgaaaggtgaactggaaaatgaattggcgggttatgattatgccaatatcgaatcgttgaagattacaggcgtgctgaacgatgttgattttctgtttatctatcgcatgatgcccaatctgaaaaacctcgatattgcagaggtaaatattacagcattaccaatacaagcattttataagtctacaaatgttgagaatctgattctcccaaatacattaataacgattggggaagaaatgttttatcaaagtaagttgaaaaccgttgtaatccctgcaaatgcaacaactatcggtaattctgcatttgaacagtgtgcatctttgatttcgatagatattcctgccaacgtagaaacaattggaactgctgtgttttggggttgttcctctttagcaacagtaacttttgagaacggttctcagttgaaaactatcggtggtgattcttcttattatggcgctttctcgtattgtactgcattaacctccattgagattcctgccagcgtagaaacgatcgaagcggcagcattcaagggttgttcctctttagcaacagtaacttttgagaacggttctcagttgaaaactatcggtggtggttcttcttattatggcgctttctcggattgtactgcattaacctccattgagattcctgcaagtgtagagacgatcaaagcgtcagcattcaaaggctgttcttcattggctacagtaacttttgaaaacggttctcagttgaaaactatcgagggaggttatccttcttctggtactttcgcggactgcacggcattaacctccattgagattcctgccagcgtagaaacgatcgaagcggcagcgttcaagggttgttcctctttagcaacagtaacttttgagaaaggttctcagttgaaaactatcgggggtggtggttcttcttattatggcgcctttggccaattaaagaatctaatgaccgtcgatatgtctgcctgtacgcaggttaagacaatcggagagagtgcttttgatggggattctgaactgcgattattcaagatcggcacagagacgccgccgacttgcggaagagatgcttttagcggcataaatccttattcggtactgaaagtaccttcgggttgtgccgatgcctataaagcaaaaagtggctggaacaactttgcaagcattacaggattagatgaataaaagcgtttcggcattatggaaaataaaagtaaaaatacgtctgaaatatcacaatggattgacaattatttgcacatttctctcgatacagaagaatatgtggaggtgcggaactttttaatattatggaatttatttgaagcgaaatggtttaaatgtaattttggaagaaataagcgcaatattcagaacatacatttaacttccgatattttcaatcaaacactacaatacttacaaaggagatatataacgaacggttctacaaacgagcgattcatgagattgcgattgagaaataatgatgatacgacctctattcagcgtgttttattagggctaaccaataattcatgtgatattattaaagccatcatcatgattatttacagataccgtaacaatctatttcatggagaaaaagccatcgcatcattgccgatgcaaaaggataacttcataaatgcgaataaatttctgattgcttgccttgaagcaacaaaataacaaaggtttctaaaagtgacagactttgtgaaaaggttaatttataagacccttttgcagagtttgtcactttttcgttttgtttatttcactaataatcttatctttataaagataaacaacaattaaattttagctaaaatgaacagatacaaacaaccnnnnnnnnnnnnnnnnnnnnnnnnnnnnnnnnnnnnnnnnnnnnnnnnnnnnnnnnnnnnnnnnnnnnnnnnnnnnnnnnnnnnnnnnnnnnnnnnnnnnnnnnnnnnnnnnnnnnnnnnnnnnnnnnnnnnnnnnnnnnnnnnnnnnnnnnnnnnnnnnnnnnnnnnnnnnnnnccaaaatgagatttatcccgaaatgttttactttgttttctctcccgaaacagcggacataaataaacccgtcgaaatcgcacttgtaaagaacaaacaatgaataatcgggtggaaaagcgaccttgaagagataaacgatataataggaataataatcgccaacgagatgaagatggagggcatgagcgaaacggtaaatttattcgactgccttgtcagagcgaacactatattatttcattacaccacgcccgacggacgggacgagatggtgaaattcccgttagcgggattctgcgaaaactatctgatgcaatttgcaaagtagcggcaggaaccgtacggtagtatggaacagacgcacgtattagaggtaaagaatattactccacaaaaaatggagttatatatactatatatcttaaaaggttaagggcaggccgaaaaaatgtggttttcctttgacaacgacaagtgacagactaaaaacgaggggctatataattgccctttcaacagagtttgtcactttttctatttatcaaataatcaattaattcacctattgtttaaccagcattgaatttgccctattgtgtaaaccaacgtgtaaaccgcgccgagcaacagcacgaaaaagagaaattaatcgacaaaattcactaccgtaactatctgttaatcaacattgccctacatttgcattcgcaattcggcgccgtagcttaattgaatagagcatctgactacggatcagaaggttacaggtttgagtcctgtcggcgtcacaaaataatgcagcgacctgtttttcgacaggtcgctttttgttttcggctgcacgaccatagcgcagttgccgattctctctttctccgccttgtactcccgccgacttacacccgggaaaatttccgtcctcccataaaatccatacggaatccgtccgtaccgacgcccgatcatagcaacaactttgagattcccgtcagcgaaaagcacctgaaaacgaatcgccaaaacatccaaattcttcccaaaagaagcacgaagcccctctccaacggcaactcgacaatgtgccccctcacccttcctgccatttattttatgcaatccaaggtacttactcaacaagcacaatgcgattccgggttcaatcgatctaaatacacaatcccgaaaaaaatcgaactcgccttcttttcgaatttataaaattttacgaatagaccacagattttacaattcaaatattaaaatatacaatttaacaaatcggtaaaatttgcaaaatcaattctttttattatatttgtaatagtgcgctcctcttttactaacttaaaaatcatgttatgttgaatttcgcccaactgaagtttctcctaactggattaactttactcaccgtactcgctgcgtgcagcgatgacaacacttcgacggaagctcctcctgcaaccatcgaaatcgcagagctctccccggaagcagacaacgtttcttttcgattaattccgaccaatgctatctcgatggcttacaagatcgagatcgagggggggggatgacgccgatttcgtttcgatagaaagctccgaagaaaaaacggtcgaaataaccgacctgacccccgaaacctcttataagctgacggcgatcgcctataacgccgaccagcgcccttcgaatccggccaccgcaacattcacgacccccgaaaaaccgaccacgccggatcccgacaaggcaaccatctccatcgaagaggtgaaagccacctataattcggtaacctttaccctgaaaaccgccaatgcagcccgcttcggctacaaggtcgatgttcccgacggaacggccgaacttacgttcgtaaacggctccgaaggcggcacctatacaaccgacaacctggaggcggcgaccgactatcaaatcaccgccgtcgcatatgacgaaaacgggcaggccgccgatcccgtcacccacgcattcaaaaccgaagcccttccgaccggccccgccgtcgtttcgatcgaagaggtcgctacgacccacagttcgatccgcttcaccctgaaactcgacaatgcggtccggatcgcctacaaggtcgatgtccccgacggaacagccgaaatgaccgtcgtcgaaaagccacagcaatcgaccttcctggtcggcagcctccaggcggaaaccgactacgtattgacagtcgtagcctataacggcaaagacgaaccgtccgaacccgccacgcattcgttcacgacccccgcctataccgcattcgcacggatcgacgccgtggcgaccgcacacggaatctatctcaaggccgacgtggacaccggcaaattcccgctctatttcctgaaaattttcgacccggaccttacggaatccagcgccgatttcgaagagcatttcaaggtcgattcccgggagcagttcatccattacctcgaagtcgcctcactgacagcgggcctcaaaaccgcctcgttcgaagagtggaacaaaaccctgctttcgacccggtcgcagcaagtccttctctacgccgctcccgttgtccggcaaggggtcgatgtcgtctgtgaagactacggcgaaatcatcgaaattccgctgacgatccccgcccgcgacgaactcggagcaggacaggccgctgtcacgctgggcgaaccgcaggttgcgggcaaagagttggagatcgccctgacaaaacaggacggcgtcgtttcctactatgccggctatgcgaccaagtccgacgtcgaagccgcaggcaccccggaacaattcgtccaggccggactggatgcgaagacctatgactacgacatcacggccgacttccaaggcacctggaaaacagaccggctttcgccgggcagcgaatattacttcttctcgttcgcatacgatgccgaaggcaagttgggtcccctgcaatacaaggagttccacacggaagccgcaggcaccgactacgatacgtcgctcacggtcgatattgccctgaagaccgcatcgttcacctcagcgactttctccgtcaaacggaacggcttcgaaaaagcttattacaacttcatcaccaaagccgatttcgaccgcaaatacggcggcaatgcggatacatacgttcaacgagagttgatcggcaaagagagtggttatccgataacgctatacagcgacaacgacatcaacggatcccgtttggcatacgatacgcaatacgtactgatcgccctgcccgaagccgacaacgaagacagatacggcgttccgacggtggtcgagttcgaaaccctcggctacgaagctaccggctctgcgacggcgaccatcgcggtaaattcgatcacggacaattacggcgtatctttctatgcctcggtaaccgtaacccccggagccgattgcgcaggttactattacgcaatgatcgaaaaaacagcctacgatgcagcagccaatctcggtgaaacgatctgcaaacaaaacggcgtaaaataccgtgccgccaccgaagacacgacgttctccaccgactactatttcgcagaaagctatctggtcctcatcccggtcgataacaacgggaaaatgtcggctccggtcacttcggaattattgaccacgagcgccaaataaaaagcaatcaaataaacaaacacgcagaactcccaacctgtccgaaacctcgctgcacggggtccccgtgacgaagggagagccggttggaacacgtcgctttcagcggcaaaggcacaaccggaacatcgagcacataaattatcaaaaaaacaaccctaaaataatccgactatgaaatctttgagtaaagcaaccttccatttactgtgttgcatcctgctattgggaactttccagagttgtaaagacgacgaaacgacgcccccgcctcccggagaaagcgccacgctcaccatttccgacgtcaaggccgaagccaataccgtaactttcaccatcacgccgaaaaatgtagatgtttatacctatacgatcaaatccgcgacggtaacgcctcaagcgaccgttcaggatccggccgaaaccaaaaccttcacatacaacagtctgcttccgtcgagcgactatacgatcgtggcaacaggttttacacaaggcggtctggaactcacttctaccgaatacaaattccgaacgctcgacacgcaggatcccggactcgaagtaccttccggagaggagccgttcatcgaatacggcgaccagcggatcgccgccaaatcggtcttcttctacaaggaaaccgatcggctctggttcttcatctccccgctcgaaggatacgacaactaccaggacatgctctatggcaacggcggaaaaaacgattacatatccctcagcttcacgccgaaccagctaaataaatcgatcaacatgaagagtgcgtccgaacggtattcgctgctcaactccatgtcgttccaacaccccatcgcatcggatatttcgatggtgaccatcgactaccattcattaatcaccgacggcggcttcatcgtcacccgcgacggggacaagatcgaaggatatgccgaaatgacctcggccgcaaccggcaagaaactccgcatctacggtacctgcacctacgaccagcaggacgccgagcggaccagcttcatcagcctcaacgacctgaaaactccgctcggaagcgcctattaccaaccgctcgaagaggaaacgatttccgaaatccatctctcgccggccagccccgtcatgggagcgctgatcgaccaggtggatgaatactacgttcgaatccgcttcgacaacgccctggcgacggctaaaactccgatcgacatcacccggatcgacaagctgttcgaactcgaaatcgtcgatcctgcccaacaaaagtcggttaccgtcaccaatacggaccttcaaggcgcgacgggcaccatcaccctctacaaatacgccctgcaagacaactaccgaatctcgttcgatctgcaggttcatgatatgcacctcgaagggtatgcggacggggcgttcgaactatactcctactactccggcaacagttatacggtcggaacgaacgacccggtcgaactccaatccgccgtcatcgaccgccgcagcgacgattactacacgatctatctggcaccccaggccggtctgaccgatttggagcaaatccggcaggcggagggcgtagtaaccatcaaagccgcaccgcaggcactggacggtctgctcgtttcctttgccaacgaaaaggatgccggacgaatactgtccatcgcatatgcaggcaaaacctacgacaaccagggtgacaacaccaagagtaccatccacggagccaccgcaaagcaaaagatcgcgctggccttctatgaagcgaccaacgaaatgaacggttattattgcggaccgttcgtcgatgtgcaataaacaaccccggcaaccgaaggtccgatcgcatctcaaacccacgattcgaccggcaaccggttctcccggaatcttcatcaagcccccttttcgaagggggcttttttcccacgcttcatccggcgaaagcaaaaaacagagctcggaccttttacttccgaatcgtcatcaattttgccgtattaccgaaaatccggaataaaaaccaccgtcacagtagatatttcaaaaaaaaacgctaaatttgtcagaaacctaagttgcttccttaagccgagcgcaatgaaaccttcgtttcgattgccgaggcgaaaaatagtcgaaagaaaatcaacgctttcgataaaccgagcgcagaatcggaggtgttcgaactctgccaaagcggaaaacaacggcgtaaaaacgaactgtttcgtagagccgaggatataaccaccaagcccgttcggttatacgaggcgggaaacggaactcaaaacagcaatgaacctaaaacagacaccatgataaagaaagaattattactcggcgacgaggctatcgcatggggagccctcaacgccggtctttcgggcgtgtacgcttaccccggaaccccctctacggagatcacggaatttatccagatgcaccccctaacgcgcgagcgcggcatccactgcaactggtcggccaacgaaaagaccgcactggaagcggccctcggcatgtcgttcgtcggcaagcgggccctggtctgcatgaagcacgtgggcatgaacgtctgcgccgacgctttcgtcaattcagccatgacgggtgccaacggcggcctggtggtcgtagcggcggacgatccctcgatgcactcctcgcagaacgaacaggactcccgcttctacgccaaattcgccatgattccctgcttcgaacccgcatcgcaacaggaagcctacgagatgatcggcgaggcgttcgacttctcggagaaataccagattccggtgctgatgcgcgtgacgacccgcatggcccactcgcgtgccgtggtcgaaatcggcgaaccccgccagcaaaacacgctccactaccccgagcggccccgccagtggatcctcatgccgggcaactcgcgcgtacgttacaaaaccctcatcgaggagaacaaactcttcgagcaggaggccgaacattcgcgccacaaccgctacatcgacggaccggacaaatccatgggcatcatcgcctgcggtctggcctacaactatattatggagaacttcccggaaggctgccccttccccgtgctgaagatctcgcaatatccgctgccgacggcactcgtacagcgcatggcttcggagtgccgttcgctgctgatcgtcgaagagggacaacctctggtggaggagatgatccgcggtctgctgggtactccgattccggtcaaaggacgtttgagcggcgagctgccccgcacgggcgaactcacgcccgacaacgtacgcggcgccctcggtctgccccgccgcgagagcgaggcggccagccagctcaccatgccccggcccccggccctttgccagggctgcggccaccgcgacgtatatacggcactgaacgacgtgctgcgcgagcactaccccgaccacaaggtattcagcgacatcggctgctatacgctcggttcgctgcccccgttccgggcgatcgacacctgcgtggagatgggcgcttcggtcacgatggccaagggcgctgccgacggcggacagttcccttcggtagccgtaatcggcgactcgaccttcacccactcgggcatgaccgccctgctggatgccgtgaatgaaaagagcaacatcaccgtcgtaatctcggacaacctcactaccggcatgaccggcggccaggattcggccggcacgggacgcctcgagcagatctgcgccggactgggcgtggagcccgaacacatccgcgtcgtggtacccctgcccaagaacatggaggagatccgccgcacgatccgcgaagagatcgaatacaaaggggtttcggtcatcatcccgcgccgcgagtgcatccagaccgccaaacgccacaacgcaaaaaaacagtagtacgaccatgaaacgggacatcatactttccggcgtgggaggacaaggcatcctctcgatcgccaccgtcatcggagccgctgccctcaaggagggactccacatcaaacaggcagaagtacatggcatgagccagcgcggaggcgacgtacagtcgaacctgcgcatcagttcggacgagatcctctccgacctgatcccccaaggcgcggccgatatcatcatctcgctcgaaccgatggaggcgctgcgctacgtaccctacctgaatccggagggctgggtgatcgccaacactacgccgttcgtaaacatcgacaactaccccgaaccggaggccgtattggctgaactcgggaagcgcaaacatgcgatcctgatcgatgtcgatgccatcgccaaggagcaatcctcgccccgtgcggccaacatcgtgctgctgggcgccgccgctcctttcctggggctcgacgccgacaagttcgaggcgggcatccgcagcatcttcgcccgcaaaggcgagcagatcgtcgaaatgaacctcaaggcgttccgcgccggatacgaatacgcacaaaaacaccgcaagtaatggcagctctcattccgcagaagatgttcgacgagcagctcgccgccatggacatcgaaaacttcgcacaggccacgatccgtcaggtcggagccgtcggcggcgccctcgagaagaactcgggcaccgaattcctgcacctcgaaatgggcgttccgggccttccgccggagactgtcggcgtcgaagccgaacagcaggccctcgcccagggacacgcttcgatctaccccagcatcacgggcatcgccccgctcaagagcgaggcttcgcgcttcgtcaaggcgttcctcgacatcgacgtcgcccccgagggatgcatcccgaccgtcggctcgatgcagggcggcttctgcctgttccagatcagctcgcagtgcgaccccaagaaagacaccattctgttcatcgacccgggcttcccggtgcagcgccagcaggtgcgcatcctgggcatcaagcacgaatcgttcgacatctacgacttccgcgccgagaaactcggtcccaagctggagagctatctcaagcagggcaacgtcgcggcgatcatctactcgaaccccaacaacccggcgtggatctgcctcacagagagcgaactgcgcaccatcggcgagctggcaaacaagtacgacacgatcgttctcgaagacttggcctacatgggcatggacttccgcaaggagctgggacatcctttccaggctccgttccaggccaccgcagcccgctatacggataactacgtgctgatgatttccggctcgaagatcttcagctacgccggccagcgcatcgccatcgcagcgatctcggacaaactgcgcaaccgcttctatccggctctcaaggagcgttacggcatcggccgtttcgccgaatcctacgccctgacattcctctacgccgcatcgtcaggcgcaagtcactcggctcaatacgctttggcggccatgttcaaagcggcggcggacggcaagctggacttcgtggggcacacccgcgaatacgcacaccgcgctcaccgcgtcaaggaactcttcgagcgtcacggtttccacatcgtctatgacaaagaccaggacgaacacgtgagcgacggattcttcttcacggtaggctacggttcgatgccgagttccgacctggtggccgcactgctgcgctacggtatctgcgcgatctcgctcacctcgacgggcagcctccagaacggcgtgcgcgtctgcgtgtcgcagatgaaccgcgaggagcagtacgacctgctcgaccggcgcctccgcgacttcgcgcaggactacgcccggaaataaatccggcattgcagctccgggtcgctgtgaaatcgtcccggagttgcactccggagaaaagaatccggcacggacatccgggaacgaccattcgcacccaacgaagagaaggagccgaataaattcggctccttcaaataaccaacaaaaaagacaaaacctaccgtctccggccgacgacgggaccgaattttcctttcaccgaccgactgccggaaacgacttagaaaaacagacccatgatcaactacaccactgccgctgaagctgcgaagctcatcaaatccaacgacagcgtttatattcagggaagcgtttcgatcccggaagtgctcgtgaaagcgatggccgaccggggacacgaacttcggggagtgaaggtctattcagccttcgccatcggacgggaggaagcgccctactgcaagcccgaatacaaagacagtttcctcgtatatagcctcttcgtgtcgaactccgtgcgcaactggatcgctcaggggtacggacaggccatcccggcttttctgggcgagatcccggggcttttccgcaaggggatcatcccgatcgacgtagcgctgctgaactgttcgcgccccaatgcggacggctattgcagcttcggcacctcggccgacctcgcggtttcggccgccgaatgtgcgaaggtcgttatcgcccagatcaacccccacgtgccgttctcctacggcgatgcgctgatccacgtctcgaaactcacggccgccgtcgaagtcgatgaacctctggtggagcttccgaccgcccagcccagcgaaatcgaccgcaagatcggcggctacatcgccgagttgattcccgacggtgcgaccctccagatcggcgtgggcggcatccccaacgcggtactcgcggccctgggcgatcataaacacctgggactccacaccgaagcactcaccgacggggtagtacccctgattcggagcggtgtgatcgacaactcgcagaagaaggtgcttccgggcaagaacctcgcgtcgctggctctcggctcgaagcggctttacgaatacatggactacaacgaagacctgatcatgaaggacgtggcatggacgaacgacccgttccgcatccgcgagaatccgaaggtcatggccatcaattcggcgctggaggtcgatctgacgggccagatctgcgccgactcgatcggcacgatgatctactcgagcgtaggcggacaacacgacttcatgtacggcggcgccctctccgaaggcggtaaaaccttcatcgcgctcccctcgaccacctcgaagggacactccaagatcaaggccctgctgacgcccggcgccggcgtggtgaccacccgtttccagacacaatacgtcgtcacggagtacggtgcggcctacctgctgggtaaaggactcgccgagcgtgcccgcgccctgatcgacattgcgcatccctcggcccgcgaggagttggaaaaagccgcctgcgaacgcttcggctattcgttcctgcggctcaaatagattcctcgattccatgtgcaggaatcgttcgcgggcacctgtccgctccgcgcagagatgattttcacgcaagatccatatattataaagtatatcaaaaaggactcctgccgaaaccggaataaccgtgtatgcggaataactaaagaccgtcccgcctcctttttcagaggatgggacggtcttttttccacacaaaatccccctctcgaccgatctatcgggggggggtaaaattttattgattttcgataaatttttcttgtttttcacaaatatactttctatctttatcgcaacaaacgataagaacggacgcagtgcctgcaagcgtttcccaaagtcgaggaattacatgacgccggcacaggaaacaccccgcagaacccttcggtttcgaccggcaggaacacttcacggatcaacaggaaatacgccgaaacaaaatcaacgaccataaaaaaacgggatcactccctctcgatatgattgtactcgaaaacatcaacaagacctaccacaacggcgctccgctgcatgtactcaagggcatcgacctcgaaatcggaaagggcgagctggtttcgatcatgggggcctcgggatcgggcaaatcgaccctgctgaacatcctcgggatcctggacgactacgacacgggcgaatatttcctgaacgggcgcctgatcaagcacctgagcgagacgcaggccgctgccgcccgcaacaacatgatcggctatattttccagtcgttcaacctgataaactacaagaacgcggtcgaaaacgtcgcccttcccctctactaccagggcgtttcgcgccgcaaacgcaatgccgaagccctcgaatacctcgaccggctgggactccgcgactgggcccaccacatgcccaacgaaatgtcgggcggccagaaacagcgcgtggccatcgcccgggcattgatcaacaagccccagatcatcctcgccgacgaacctacgggcgccctggacagcaaaacctcgcaggaggtaatggacctgctgcggcaggtaaacgggacgggcatgaccatcatctgcgtaacccatgaacagtcgatcgccgaccagacggacaagatcatccacctgaaggacggcgtgatcggttcgatccaaaacctccggccatgagagagttgctgttggaaatctgggcgtcgatccgccgcaacaagctgcgcacgttcctcacgggcttctcggtcgcatggggcatcttcatgctggtcatcctgctcggctcgggcaacggactgaaaaacggcacgctctccaatttcggatcgatggccgtcaattcggtcatcatcaacggcggctggacctcgcaaccctacaagggctacgacaagtggcggcgcatcaacatcaccaaccgcgacctggagatcctgcgcaccgaatttcccgaagtagataaggtttccgcccgcgtacagggaccgggacaatacaacctctcccacggacgcgactttctgaacaatgcggccgtagtcggcagcgacccggaataccgcgaaatcatgaatgtcagggtgctcgacggacgcttcctgaacgataccgaccttcgggagcggcgcaaggtgatcgtcgtggataaaaacgtgcgggatgtcctgtttcacggtcaaagtcccgtcggacagcacctcctggtcaacggaacatcgtacagcatcatcggtgttttcgagatggaccagttcggctcctacacattcaccttcatcccgctgacgaccgcccaactgctcttcaaccacagcgatccgagcgtaggacagacctatctttcggtgaaagacatcgacaccgatcagaagatggccgaattcgaacaacggctccgcaatcgtctggctgccgaacataccttcgcgcccgacgacgaaagcgccgtctggatctacaaccgcatggaaggttacaagaacatgatgctcgtcttcggcggcatcaacctcttcatctggatcatcggtctggggacgctgctcgcaggcatcgtgggcgtgagcaacatcatgctggtaacggtgcaggagcgcaccttcgaattcggcattcgcaaggctctcggagccaaaccctcgtcgatcatccggctgatcctgaccgaatcggtgatgattaccgccgcattcggctatatcgggatggtgctcggcgtattcgccatggaaggagtgaacaagctcatgacacaaactccgcccggtgaggagaacacgttcaacatcttcgtcaatccgacgttgaacctctcggtagcggtaagcgcgacgatcgttctggtgctggccggacttatcgcaggttacatcccctcccgccgggccgcccgactgaagaccgtcgatgcccttcgacacaacaaataaccgacacgaaaaccgcagcggccgggacaaaagataaaaggagccgcaacaactggaagcgagaaacggaagaaaacgcaacggccggggacgacaagccgggaaaaagataaggaaacgcccgcaacgccggtaaggaaccaccccggcgtcagaaggacgaccaaagttccctcccgaggaggggattcagggaaggataaaattggaacacgcggctctgccgcgaaactacaaccaaaaggaacgaaaagagcaacgaaaaaccgggaacaagacaaggaggcagccgaactccgaaggacggccaaagtcccctcccgaggaagggatttagaggtaggtaaaatcaatacgcgcgttgtcgcgcaactacgaccgacagaaaagaagatacgaaaaagataacagcaagataaggaaccagactatgacaggatttttcgatacggatcgctggaacgaaatctggcagacgatctcccgcaaccgcaggcgcagcatcatgacggcgctgggtgtcttctggggtatcttcatgctgatcgtcctgctgggtgccggcacggggctgggccgcatgttccgtgcccaactgggcggtacggccaccaacgccattttcatcatgtccgaccgcacctccgtcccatacgaaggtatgcctacgggccgtagctgggaactggactgggacgacctggaagcgctccggaaactgccccgcatcgaatacatctcggccatttgctggggcaaccaacgcaacatgagccaccaagaccacaaaggcgaattcggactgatgggctactcgcccgacatgcagcagatcgccccccaacagattctcatggggcgctacctgaacgaagtcgatgaactgcgccagcgcaaagtctgcgtaatcgggcttcaggtctggcgcgacctcttccccggcggagaagatcccacaggcaaaacgatccagatcggcagttcctacttcacggtcgtcggcgttaccaaacccctgggcggtatgatggccttcagcgacccggagcggaccgtcgtcatcccggcgctgctcgtacagcaaatgtacggactgggacggacgatcgacatgctggcactcaccggatatgcggacgaaccgacccaagaggtgatccaggactgccggcaaagcatcgccgcacggcacctgatcgctcccgacgacaagaaggcgatctattttcaggatacctccgaggtcttcggcaagatcatggggctcttccgaggcatctccctgcttacgtggatcgtaggtctgggcacgctgctcgcgggcatcgtgggcatcagcaacatcatgctggtgctggtacgcgaacgcacgcaggagatcggcatccgccgcgccatcggcgcttcgcccctgacgatcctttcgcaaatcctctccgagagcttcatcctcactttcatcgcgggcatcttcggtttcggtgcgggcgtaggcgttctctccatcgccgacagtttctacgcgcgggccgcccagatggaccaacacctgcccgatatttcatggcagatctccttcggtatggggatgctcgcgctgggtatcctcgttctgggcagcctgctggcaggcatcatccctgcgacccgggcactgcgaatcaaagccgtggacgcgatccgcgaagaataaaccccgaaactcgcaacaaacgcaaaaaaccgacataatatgaaaaagtttctgaagattttcctgggcatcctgttcctcgcactgctcgtcggcacgttcgtcttcctctggaacaaaacccgccccgtaaaggtggtttacaccctcgcaacccccgtgcatgacacgatccgtcagtacgtcatcgcctcgggcaaggtcgaaccccgcgacgaggtgctcatcaagccccagatctcgggtatcatttccgaggtgctctgcaaggccggcgaccgtgtaaaacagggcgacgtcatcgctacggtgaaggtcattcccgaaatgggaaccctcaatgccgccgaatcccgcgtgacggtagcccggctctcgctcgaccagacccgcaaggagttcgaacgcaccgaagccctctatgccaaaggcgtggtatcgcaggaggagttcgagaaggggcagaccaccctgcgccaggccgaagaggagttccagaatgccgaagacaacctggaaatcgtcaaaaccggtattaccaaccgatacaaagatttaagcaacacccagatacgctccaccatcacgggtatgatcctcgacgtaccgatcaaggtcggcaactcggtgatccaggccaacaccttcaacgacggcaccacgatcgccacggtcgccgacatgggcgacatgctcttccggggcaatgtcgatgaaaccgacatcggccgcctgcatgccggcatgcccgtcgtactgaccatcggcgccatgcagggtaccgtgctgcaagccacgctggagtacatctcgcccaaagccgccgatgtgaacggcatcatcatgttcgaggtgaaggccgccgccaagatcccggaatcggtcttcgtccgtgcaggttacagcgccaatgccagcatcgtgaccgacagccgcgaaggtgttctcacactgcccgaaagcaccatccagttcgaagagggcaagccctgcgtctatatcctcaccagtcctgaggagagccccgaacaaaccttcgagaaacgggacgtaacgctcggtttgtcggacggcgtgaacatcgaaatcgtatccggcgtcaccgaaacggacaaagtccgcaacctccaacaacagtccatctaaatccctgccaccatgaaattcggaactcttttcatcgcactgctgctcgcgggcagcacggcgcaggcccaaattccgactccgacacccgaagcagacccttggagcctggacgactgcatccgatacgcccacgaacataacatacagatccagcaacaggcgctgcaagtcgaacagcgctccgtcgaactcaacacctcgcgccacagccgcctgcccgacctcggtgccaacctcggtacgaacttcagcttcggacgaagcctcatcagcaacaacacctacgccgacaacaaccaggtgtcgggttcgctcggcgtttcggcctcgctgccggtcttcatgggcggacgcatcaaccacgaaatcgcagcaggcaagctgagcctgaaagccgctgtccaggacctggaccggatccgagaagacgtatcggtcaatattatgtcgtattacctcgacgtgctggtcgcaaaggagttggttaatgttgcagagcaagcgctcgccttgagcacacaacaggtggaacgcagccgggagcaggtacgaacgggcaaagtcgccgagtcggtgctttacgaaaacgaagccctgctggcggccgacgaatacaaactaacccaaagccgcaacgacctctcactctccctgctggccctgagccaggccctgaaccggacgagtgccgaaggattcgacatagtcgccccgactttcgacagcctcaccgtggagtcgatgcgtcacctgcgtaacccggccgaagtgctctcctacgccctggacaaccgtccccgcatacaggccgagcgcttccgcctcgagcaggctctccgggcggtgcggatgtcccgtgcggcttactacccccagatcacgctgacaggaggatacggcaccaacgtctatcactcgttcgctacgggtgcggtaaatcccgctttcggacgccagttccgcaacaacagcaccgaatacgtaggggtggcgatcaacatccccatcttcaaccgcatggcgacccgcaacagcgtgcgaacggccaaactgggcgtacggagccagcagctcgtcctgaccgaagccgagcagaccctgcaaaaagagatcgaaacggcctactaccaggccgatgccgccctgttgaaataccgttcggcggaaaaagcgctcaattccgcacaggtcgccttcaggtacgaagccgagaaatacgctgcgggccgctcgacgaccttcgactacaacgacgccaagacccgcatgcagaaggccgaatccgaccagatccaggccaaatacgaattcatattccgcaccaagatcctcgatttctacgcgggtttccccctgacgctttaagcgcggtaaacggaacccgaagactccgaccgcaagcagtacaagagagaagctcccggaaacgcaaatcgtttccgggagcttctcttgtcgatgtagattctctctctgcagatgtttccgggcaactcttctcctgtcccaagcggaaaagagaggcaatccggcggattcgttccgcagccttactccgcgatcgaaagatcggcgaaggagaaaacttcggtcgaaacctcgcccagcggaccgctcttggcattgacccccacctgtactttgacgaagtcgatgtacttcagttcgacaggcgttccgtcgggctgcatggcattggcgattcggaatccgttgctctgtccctttccgtccattgcatcgccgcccgcaagacagtcgcttccgtaattgtcggcataaccccactcgtaagggcggttgatccaaaaccctctgtcatcgaccatattccgagattcgagcagcgtaccgcgcaacgtataagtatcggcggcccaagccggataatagaaatcctggtcgtgaaactcacccctgtattcgaccgtgccgctgcgaccttccgaatcggtccactgcacgtccatcccccttccggcagggcggtaataagtcacggcataaccggagacagtcccttccttgcccgtttcgctgccccgcaactcataccactcgtcatcgggctcgccgttgccgttcacgtcctgcatgacccacaccacacccggctccgagctggtgtcgaacgcattcccctgaatggaaaaatcgtagccgctttccattcgggcgatactgtgatcgaacccgacgatcagataaccgccgaatcccccgagcgaaacataactccgcgcctccagcctcccggctgcataagctacggcatcttcatgagtacgctcgttgcccgtatatccggcttcggtcttttcgccgaccaactgcccgggagcgggcagaaattcgtaaaccgcattctggaaacgactgctggccgcactcgccgggcgtcggcgctgctcctcgtccgcaaaggcgtggacgacgatctcggcagacagcgtgacaacccctcggacgatgtttcgcgtaagacgctcggaagcatcgccgccttcggtcacatcgacccgaacggtatagtcgcccggcccgtcgggtgtaaacttaaacacggcacccgtttcggcagcgaccggttccccatcgaccgaccaggcgaactgcggatcggcgacataagccaacgacggcgcaagatagaccgcacggccgacgaacgtactccgatcggtcgtcttacagtaatgagagagcttttcgaagcggacctccgaaggcatcttctccacgacctccacgacaaattctttgacggaagttccgtcgtcgttcgatgcctcgatacggatcgggtagctccccaccgtctcttcccggaaggtatagctcatctgcgtagaaacgacctcgccggcacagagccaccggcagcggaagtcctcctggtccgaatgctgaatatcgggagcgaaggtatattcgacacccggcagaaccttgagcccctcggcaggcagtgcgagcgaaatgacgggcggagtaagctccagcacatccacccgcagctccgcttcggcttttccggcagccgtttcgacacggaaagtgatatacacttcccccagttcggtaaagacggccgtataggtcggttcggaacctgccagcttgccatcgacgatccatgagtaggtagctccctcggcatactccaccgtcggagcgatggtcagctcccggcccgtcttgacggtataaacccccgactcgctgtcgagcgtaatgacgggagcatgatcccggtcgtccaaaatcacttcgtccttgttgcaggcggtcgtcaacagtgcagccaacgccatccaaaacaggaaatgtcttttcgaaaaaatccacatagcacgttacatatattcgcgtttacggcacgcggcagagcggaaacccgccctgccgacgcacacaaaaacgatttatcttcaaaaaccgtcgcctccgcccggtgcagtccgtcacggacttttccgcaagtcggaaacgatcgccgaaatcggtccggaaactctccggaaaaacattacagctcgatcgttatgtcatccagagcataataggccggcatcgagaagccataaccgttatcggggccgcccgtcatattgaaacgcaccttcgccaccttgcccagcgaagagaggtcccatttggtccactccttaatcagcttgtccttcgatgcgaaagtcatcgtcacggtgccggtctccttacctgcggcatcgtagcccgtagcatgaatcagtacatcctggccctcctcaagcgcaggtgcaagggcattgcccttggctgccacactcaggaaataacaggtcgaattgatatagcagctctggatcgtacgcgccacaccgtcggcgaaagcgaaaataggacggctgtcgccatagtcggggtgcgcctcgtcgtagttgccgtaaccgataaggaaattatccgatccgtcgtggccgccgcccgtagtagcatcctcgttccgggcattgtacaggtaaaggtcaagctcgtaggagttgaacttctcgatatccttggagttgtaggacgataccataaacgggtatccccaaccttcgggacagggcgaagtcagctgcgtggtctgatcggtccaggtgtacgccttatcttcgtaaactacggacatcgccttaccgccgttatagttcgccaccaccagcggcgaccagtcgtcgccctcgaaagtgatcgtataggtctggggtccttcgtccggcccgtcgtcgtccttcgaacatccgacgaaagttaccgcagccgcagccagcaaagccaaaaatactctttttttcataatcttttattatttaataaattgtatgtttcctcctgtacgaaagatcgccgcaaagcatacgcttcgggggctcatggcaacaccgggtccggaaaaatcgactgaatggggaaatcgagcaaacagagcaaccgacattcgtgattccatcccgtgacccgcaggtgtaaaatcttcgtgcaaaggcaggtcttctgactcatcccgtccgtcgcgccttcccggcttcatggccagtggcaaaagagagcgatcgaactattccccgaaaggaaacaggacttacagcagcgagcactgttccggattcgcaccggattccctattactccgcacgcttcgaaaaaacatacggataccttttgcgggtgcaaatatacgaataatatttaattcgaaaattcaaaaaaacacgacgacctcttgacttcgccttttcgtcagcgtatatttgcagacgcgcccttcccgtttcccgaaacgggcgcccatcctttctctattttttcgatttccgcctgtcgccggactcttccggacggcaatgacactgtttcatccgactaaaaaacacacgacatgccccgaggacgcaacaaagccctgatcgcccgacgcgacgaaatgctctgccaccgctatcactactggaccgaaacgcagcgtctgcgcttcgacgacaccctgaaaatcctctccgaagaggaattctttctctccgaggagcgcatcctgaccatcctccgcgccaacggcgacacgctccgcgaactcgccggccggcctactccgaaaatgcgaagagagcgcttcccgacaaggcgccatacaccctctccccggaaatgatccgacggatacgcccgtccctggcaataaggatattcggcccgttcattcctgcgatccggcaaaaagaggcatccgcacatctccattcggaaaaaacagctatttttgcagccggaacaatcccggaacgaaacaaaatggactggtttacggatctttttacccaacattcggccattcaagccgtcgtcgtgctctcgctgatctcggtgttcggcatgatgctgggcaaagtgcgttttttcggaatttcgctcggcgtgacgttcgttttcttcatcggcatcgcagcgggccatttcggactctcggtcgatccttcgatgctggctttcgccgaaagtttcgggctcgtactcttcgtctatgcattgggattgcaggtcggccccggtttcttcagttcgctccgctcgggcggcatccggctggtttcgctcgccacgctcatcgtcctgacaggttcggcactggccgtagggctcggctatgcgacccgtgttcccatgagcgacatggcaggcatcctgtgcggcgccacgaccaacaccccggcgctcggtgcggcacaacagatgctctcgcagatgcagttggacagcaacaacgccacgctgggctgtgcattgacctacccgctgggtgtcgtaggcgtgattctgggcatcatcgccgtacgcaaactcttcgcccggccctcggacattccgcaaccggacgccgaacataaaaagaatatcttcatcgtcgaattcaagatttccaaccccggcgtcgtcggtaaaagcatccgcgacgtcgcggcatacagccaccaccatttcgtcatctcccgcctttggcgtgccgggcaggtttcgattccgacttcggactcgaccctcgaatcgggtgatctggtactggtaatcacctcgccggacgacgtgcaggcactggaactcctcttcggcgagcgggtacagaaagactggaatacgcacgacatcgactggaacgcattggacagccagctcatctcccggtcgatcatcgtcacccgccccgaaatcaacggccgcaaactcagctcgctgcgtctgcgaaacctgtacggcatcaacatcagccgggtgcatcgttcgggcgtacaactgctcgccacgcccgatctcacgctgcaactgggcgacagcctgacggtagtgggtgaagcgcaggcgatcgaaggcgtcgaaaaaatcctcggcaatgccgtcaaacagctcgacgaacccaacctgattccggttttcatcggtttgctcctgggcctgctgctgggaagcatccctttcgcggtaccgggtatcagtctccctgtcaaactgggactcgcaggcggcccgatcatcctcggcatcctgatcgggaccttcggcccccgcatccacatcgtcacctacaccacgttgagcgccaacctgatgctccgggcattgggactgtcgctctatctggcctgcctggggctcgaagcgggcgcccatttcgtcgaaacgatcatgcgccccgaaggaatgctctggatcggactgggattcctcctcacgttcgtccccatcgttatcgtagccgccctgtcgctgcggttcttcaaactcgatttcggacaggtagccggcatcatgtgcggcagcatggccaacccgatggcgctgaactatgccaacgactcgatccccggcgatcatccggccgtggcgtacgcgacggtctatcccgtatgcatgttcctgcgggtcatcatcattcagattctgatcatgtgctttatttagcggtcgccggacggcagaccgccctgcgttccgaagaggcgcagcgaacggaaccggggactcaacgcccgacatccggcagctccgccacacggcggatctcgccttcgaaattgggggtaaagatcccgccgcccactccttcggcgatctcgcgcagtgtccagaagcgacctccgtccaactcgccgctcggtacgacaggcccatcgtacaccgtcttatagacatagaccaactcccgttcgcgttccgactcgaacaggtaggtcagcacgtgctgcggttcgaaatccgtcacgccgacctcctcgcgcacctcgcgccgcagagcagcgagaggctcttccccccaatccacatggccgcctacggccgtatcccaccgtccgggctggatatccttccacgccggacgtttttgcaggtaaagctccccgcaggagttgaacagatgaaggtgcaccaccggatgcaacagcatcgacccgccgtggcactcgccccgcgtggcccggccgacgacacgtccggcggcatcgaccaccggaaacagctcttcccgattatccgcgcatttcatcttccgacaatattctatgagttttattccgaccgtaaagactgcaatagacggagaacatgacgaagcccagcagggccatcgccgcaccgggcagggcggcatattgaggccccaggccgaaactgatcggcagaccgccgaagtaggcgcccaaagcgttgccgaggttgaacgcgatctggatcgacgcggcgccgagcatctccccgcccggcgcattctccagaataagcagttgctggggcgatgaaaccccgaagagcgaagccgtcgtcaggaacatcagcggaatcacgagccagtcgatccgagccgcgaagaagatccctacgagcaacagacagatcattccctgaataaagcgggcgacccgttcgggagagaagcggtccgacaaatgcccgcccgcgagattacccaccagcattcccagccccgcgaccatcatcacggctgtcatcgcctgcccggagatgcccgccacacgcgtcatggtcggagtcacgtagctgtaccagcagaaaactcctccattggccagcagcgtagccagcaggattagccaaggagcccgcgaaccgaggaaccggaattgccccttcaatcccgtatcgggcagcgccggcagggcaggcacccagcgggcgatcagcagcagagccataattccccacagcccgaccatcccgaaagccagccgccacgaaagatagctgcccaaataggtacccaacggcacacagaacaggttggcgacagtcatcccgaggatcatgatagacacggcctgggttttgtgtcccggatcggccacccgctccgcaacgatcgaacctacgccgaagaaagccccgtgaggcaggcccgacacgaaccgcatcgccaagagcatccaaaagtcgggcgccagcgaagcgcagacgttacccaggacaataagagcggcaagagcgagcagaatccccttcaacgcccgcttacgtgcgatgagcaccgtcgcgggagccccgacgcaaaccccgatggcataggccgaaatcaggtccccggcccgggggatggaaacgcctaaatccctcgccacatcgggcagaatccccatcatgacgaactcggccataccgagagccaacgtgccgaaagccagggcgatcaaactctttttcataaatcgactctttttaccgacggctccgcactccggagtacggaatctctttcgcaactttcgcattcttcggaccgctccgcagctcgacaatacggcgcgtccgaagcacggtcttttgattcggagaacaaaaatagcgcatatcttcccctcttccgcctaaaacgaaagaatttctcaccgacctgacaaaccggccctcccggattctccctaacgggatgaatccgggagggccgattatatcctatccgaaagcccaaagagagccgtatgactgagatcaataccccagccagtgaagccactcgagcgcttcgggcgtcagcttgtcatcgcggtccacccaggttccggactcgatgagcaactttttatactcctcgatacggcgcgtgatcggaaaatcgggtcgcggcagcgcactcttctccgcacgctccgaagggcgaatcgtccggtcgaaaacctcccgaagcgccgggcgccggtgtccctcccacttgaaatcttcgagaaaaagagcctgcgtctccggaatcttatccatcgggaaaatcgaatagaccggctgattgcggtaggtaatgccttcgaccgtattgttgtcgatatagtaggtagccgcaccgctttggatggacatcaaccccaccggttcgggcgaatcgtcctcctgcatataatagatggtctgcacgttaccgtccacgtcgttgcgatagatcttgttattgcggaaataggcagtaatcagcttgcccgtcacctggttgtaagtcatcgtgtcgatctcgctcgacataaccggacggccgacgaattccgctttctggagtttggagttttcggtatagatcttcatcacgtccgaagtgatctggttgtcctgattccaaagcacgggatcgatatagagcaggatcatcgagtccgtggaaacggccaccagggaatcgcagaccgcctggaagtcgttgcggaagatctttacccggcgataccccttgaccaaccggtagagggaatctccagcaggtgcagcgatcgaatccccccgcaaagagtccgctgccgcaaccccggccttgagcgaatcgagctgcatggaatcgcgtcccagcgaatccgcagcaagagagtcccggaacaaagaatccaacgcggcaaaagccctggcctcccgcagggagtcggcgaccagcgaatcgagagccgacgccggaagcttgcctttcaggatcgccttcccggttttggcacgccgcttggcccagattttctccatacgttcggcgcggcgctccaggttctttctgcgcaatgcctcctccttctgtttcgcagcgtcgagcttggcagtagcccgagcctgacgtgctttggcgatctgcgccagcttctccttgcgggccgctgccgcctgcgcctttttcacggacgctatgctgtcggcctgtgcccgcaattgagctttcaagctgtcggcctgggctttccgctcccgcttggaaagaatatgcacggaagaatccgcaggaagcgattttggaccggcctgcgcaaggctgtcggaaaaaagcgtatccaccgcagaaacggcggccacggaatcggcaggggtcattccgccccccacccgatcaaggctgtcggaaagaagcgtatctattgctggggcggcatccagagaatcgccccccgttcctcctttttcagccggaacagccgctatgggttctgcagcggaaccagaaccggcatccgcagtttcggacgaggtttcgacggctccggccgcagcctgcggagcagcggcatccgcctgcgatccatcctgcgaggcttttggatccgcagcactcggtttcgcagccagtgaatccacagacgatccccccttagagccggccagagaatctgccgcctttgccttcaccttcgccaacgaatcggcacgtgcctgctcgctcttcgagatcgtataaagaaacatcgaatcggcacacatatagagcgaatcgctctgactcgtatcgtagctgaccaccgaaggtcgctgcgtgagcagagcattgcccggctccttccaatattcgccgtaatcgccgaaagcgagcactttgtgctcggcgtcgtcgatctggatattccggaacaaaagagcatgcccggactcccggtaatagtcgaggctgtcgctccacagctcctgcttttcggtcatcacatacccgttgcgagtcagcacgtaaagctcgcgcggcttttcgtaacgtccccggtcggcataaatgtaatcgccgccttcgttccagatgttggttcgctcgaagaaatgagcctggtcggtatccgtatcgtacaccaccgaatcgcccttgagttcgtacttgtcgttgcgcatctcgacacgatccacacagataatctggtgcgtatcggcataatagtagccccggtcggattcgaggtgattctcgcggttggtcagcataccgcctccgctgaaagtaccaatattgtccagcgtattgaaccggaaatcataagtatagagcgtcgcatccccatcgacgaccttcaccagcggagcatagacccgcgcctcgttgatctcaccgttgtagtcggcccggtcgccgtaaatgtatgtctcttttttattgatcagtacgttgccgaagcactcgatgcgcttgtcgttgtagcggatcgcgctgtcgcaggtaatgaccgccccgttgtgctgggccgcgaaatgccctacgagcactgtcgcggtcgtatcgccgtaaggaatgggatatccccggtcggcgacgaaatcgaccaccttgttcgactcggggtcctgggccggagcacccggagccgacggggtctgaacacccgcaacgggaacggccagcggcctgttccccgcgaggatcacacctccggcgacacctgcgaccagcagtgcgcacactatttttcgcaatcccttcggcatcggacgatctctattttacccagttcttattttcgaactctccgtcccgaaattcgggatcgatataaatgtacatgccctcgatcttcttgtcgagccactccttgaacactttctcgcgtttggcgttcagcgccagctgttcgacgcgaatatagtcctcgtcgagcgaaaccttgtgcggagggatcaccttcacgagcttgacgatcttgctgagctggttgcccatccagtcttcggtctgataggcgtcggaaatttcgccctccttaagattgcgcagggcattgtagtcgtcgaggctcttgccaccggcccggccgaaatcttctttcatgaagcgtgtttcggtataacttgcttcccacctttgagtaagttccagcaaatcgtggttggtcaccacgccgccgttcatcttcgaattatcgtcgtcggaaaacttccgggccgcctcctcgaaagtaatcgaatccttacggatcaggtttgcgatactgtccagcatacgggccggagccgccagctcctcgagcgtataggagggtcgcaacacgatatgacgcgcatggtacatacgccccttctggtcgatcaactgaatcaggtgataaccgtattgcgtttcgacgacctcggaaacctgtcccggcttcagatcggccaatgcgtccgcaaactgccgcacgaacccgtccaaaggctgggggtccagttcgccgccactgatggccgaaccgtccatcgaatacatgcgggccatgatgtcgaaacgggtctgccccttgatgatgcgctcgcgcatatccagcaaccgctccttggtgcgctgcttggcctccttgatcgacgccgggaaacgggtgatctgggcataaacgtactgttcggggatagtcggcagactgtccggatcggtcttcttgtagtaacgctccacctcgccgggaatcaccttgattttccctactacggaactctgcatagcctgggcgtatgcctgctcctcgtaacgctgacgcagcatttcgcgcacgttgaagatcggcatatgctgtttggtttcgagcgcggcgatagaacccgcatcgtcgatgagcgcctgcaaatgggcttccacccgctgtgcgatgcccgaatagctgacatccaccgaatcgatgagcgcctgattgaacagcagcttctgcatcagcagttgttcgagcgcttcgtcgtggggatcgcggtccgaagtgtaaccctgctggcggcgctgttccaccagctcgcccgcatattcgtccacctccgaccagaggatcgacgatccgccgacgacggccaccacgcggtccagcatcacctgccgcttctgggcggcccctgcaaaaatcgccagcaccaacgctgcgcaaaacagaatcttcttgctcatcagttctctattttttcttcttcatggatcttcactctcccctcctcgaccgcttttcggtaaacctcctcgtcgtaggcccgaatgatctcgttctgccgctggttgtagaggatgcggcgcacgatcgcctcgctgcgctccagcggttcgggatcgcccggacgaagcacgtcgcttatttcgaaatagtagcgcgaatgaccgtcgctcatctcctgtacggcccgcgaggagagcagggcgtcgtaactctggttgcgcaatgtgggcagatagcccagaaactcggagaaggtcacccacgaagaggagaaatcgttcagtacgaaattgttcttggtacagatgtcggcgaactcttgctgccgggatgagccgggctgcgtcatcaacttgcgcagcttcggcgcctgccggttgttggcgtcgaagcgaacgatccgccccttgaccagggtttgattgaccttgaaatccgacgcgtgttcacggtgataggcagcaatctgatcggcggtaacgagcgtatcgatgcgctcctcgatcagatgctggtcgaacttacggatcaacaacgcctggcggtactcctcgaccagcgaatcgatgtcctgctcggcatcggagaaaagttcttcggcctcgtgcaatttaagctgtttgtgcacccacttttcgacataacggtttacgaaagccacgctgtcctcgccgaccactcccttcggaatcgcagccttaacctctcgcgcgtacaattttctaccggcagcctcggccaacacgacccgacctccgccccaatagcggggcacttcctggcaccctaccgcaagtacgagcagcagaacagctcctattttggcacaaaaactcataactacaagggacaaagataatgaaagccgagagcctaaccaaatttatttgagttaagccgaggcgcatcctatcgtctaaaaaagatactttttacccgaacctaacgtaccgtgcatcccgaatattacattacgccctaatttatcgtatcgaaaaaaccggatgctccggtgcagataatccggggaaaaccggcacagacaatacttctgcatgatacccgccgacgatcccgctcctgcggtacgccgcaaaatagcccccgaccgtcacaacaggttaccggatcgtatttttatccaactttttcacccgggccagcaaacggtagatcatatagcccgatgcggcgaaaagcacgagcgcaacgacgtaaacgatcgtataaagtgtatcgctgccgataaccgaacgtatcgtggccccgtccagtccgaccataatcaacaggaaagccgcgccgttgttcatggcatggagcagaacgaccgaaaagatcgaattggtctcgatgtagatgaaacccaggatcaggcccatcacgaaagcattgaccgccagcgccggatgtccgtgcaacacggcgaagaacgccgacgagaggaacaaagccgctacgacgccgtacttggcccgcaccgactcgagaatgatgccccgacagaggaactcctccaacagaggagccataaccaccagcgtaatgatcgcccagaagccccggccgtaaactgcggacgaaggcatcggaagcagctccaccaccggttcgatgacgataccggcagccagcatcatcaccagtccccaaagcagcagaaccggattgaggccccgcgccgaaaagcgcagcgtcttgcgcgttccgtgccgcaagcggcgatagaacagcgtgaaaagaatcatcagtcccatcgtcaccaggtaggtgaaagccgtaaaacgcgccagagcgtcctgttgttcgggcgtcggagcgacgttgccgcgcaacaagtcccagtccggaaaatcgaacccggcgagacgggcggcaagcagtccgacgaattgcagcaaataccagattcctaccagagccaacaggtcgataagggtcggaaatcgatatttatgagccggttgcggcgtttgtccccgatcggatgttccgggagtatccccaacaggagcttgcggacggacatcggacggagtcgtggaatcggtatgtaccatagcttctatgttttatcttcggtataaagacctgttttacgcttcgaagataggcatttttcgggtatcgttatggtttttcccgataaaattcgtatttttggccgattataacccgttaaaatcagcaaacatggcaaaggtcatcgcattggccaatcagaaaggcggcgtgggcaagacgaccacggccatcaacctctcggcgtcgctcgcgctgctgggcaagaaagttctcctgctggacgccgatccgcaggccaacgccacgtcgggactgggcttcgatatcaacctggagggcatttacgagtgcatcaccggagcgaagacggcggccgacgtaatcctccaaagcccggacgtaaagaacctctggctgctcccctcgtcgatcgacctggtggccgccgacaccgagctaccgaagatggagaacggacaccacgtgatccgccgcatcgtggagagcgtgcgcgaccgttacgactatatcctgatcgactgctccccctcgctgggctatacgacggtgaatatccttacggccgcagacacggtgctgattcccgtacagtgcgaatacctcgcgctcgaagggctctcgaagctgctcaacaccatccgcatcgtcaagaacggactgaacccggcgctcgaaatcgaaggcttcgtgctgacgatgtacatgcgcaaccgcctcaacaaccaggtggtgaacgaagttcgcaaccacttcggagagctggccttcgacacaataattcaacgcaatatccgtttaggagaagccccctcgcacggaaaacccgtcatcttgtacgatgcttccgccgtcgggtcggctaattacctcacgttggccaaggagctcctgaaacgcaaccgcaaaagcaatcaaaaagcaaaatagcattatgaaacagaagggattaggacgcggtctggacgccattttcgggagcgaacacctggatgccaggctcaaaccgatgaccgaaatggcggagatctccgtttcggcgatcttccccaaccccacgcagccgcgcacggagttcgatgaagaggcgctcgaagagctggccgactcgatccgcacgctgggcgtaatccaacccatcacggtcaaacgcaccgacgacggacgctacctgattatcagtggcgaacgccgctggcgggccgcccgcaaagccggactggagtccctgcccgcctatatccgcgaagtggacgacgagaacctgcatgctatggccctggtggagaacatccagcgcgaagacctcaacgccatcgaaatcgccctgggaatgcagcggctgatcgacgaatgcaacctcacgcaagaggcgctctcggaaaaggtcggcaaaaaacgctcgacggtgtcgaactacatgcgccttttgaaactgcccaacgaagtacaactcgccctcaaggaggggcttatctcgatgggacacgccaaagcgatcgccggagctcccgaagagttgcaactgcgcctgctcaaaaagtgcatccgcaagggactctccgtgcgccagatcgaggaactggtccgcgcactgaccgaccctgcggcaaaacccgcagctccggccgaagacgaggagtatcccgaatcgtatgcgcggctggtggagcagctcgaaaaattcttctcgcaggagatcagcatcaaacgctcgaaaaacggcggcggtcgcatcgtgatcgacttctcggacgaccgggacatcgaccgcttcatcgaaaaattcgagaaaagaggcgcttccgccgaaatccgcaacaataaatagatgaaacacacccggggatatatccgtctgttggtgcttttcgcctttctcgcattgtgcggagcaggcgaagcatcggcccaagttccgttggaccgttaccgtagcgcgaaaactttcgtgcgcagcggtctgatgcccaaaccggacagcctggccaaaaaccatcttacggactctctgctactgatgcgggtggactctctgcttcaggacagtaccctgcgcgattcgctgctgcgttcgggcatcgattcgctgcggctccgggattcgctggctgcgagactgcacccgcaattcgtccccgactcggccctgcttctgaaaaccgactccctgcccgcagcactcggagcgcccgactcgctcgcaggccgaaaagacctccgcccccggcgcgataccatctcgctgtcgggcgtaagttggatctcgctggtagcgcccggtttcggacagatctacaacaagcaatattggaagctgccgatcctctacggaacggtaggtgcgggactgaccctcttcttccacgaaaacaacacctacaaacctctcaaacgacaatacaacgccctgctggaaaacggtacggcccgcacggaggagttggacgacgtacagtcccgtatgatccgcagcaatacgcgcaggcagatctatctcgggcttacggtcgcctcctacctttacttcctgggcgatgcggcggtcaactaccgctacgacgcctcccccgtaaagaaagccacgacactggccacgatcttccccggtgccggacaagtctataacaaaagttactggaaactgcctttcgtcgtaggcggactggcaaccacgatctataccatcgactggaacaatcgcggctacaagcgtttcaagaaagcctactccgatcgtagcgcctacgacaaagccctggaagagcaccagaaagacccggagcaccatcccgacccgcctgtagccaagggcgaattcggtactaagtactcagcggaatttctcaaaaacctcaaggacaattaccgccgcaaccgcgacttatgtatcatcatcactgccggactttacgtgctgcaaatcatcgacgcccatgtggacgctcatctgaaaagttacgacatttcggacgatttaagcgtagagttcacgccggcggtgaattacgtctattccccgaccgtcggcggacaccgcccgactttcggattcaacttcaacctgaatttctgattccatcatgagaaagatcctcgcctgcaccctctttctttcgatcctcctcggctgcgcgaccgcaaccgcccagagccgcaaagagcgccgtgccaagagaaaagccaagaccgaaaagcaggcttcgaaatcgacccatactcccgtttcggtcaaaccggagaaaacagtgacagaaaaaacgaccgtacagcaaacggagccttactgtccggaactgaatcgcaatctcaccccggcccagatcgactcgctcgtggctctctggcgggaaaagcagactctgcaatcctacgatacgtttttcaacgactacatcgacatcgacagcctcgcttcctcgagtgacacgacccccgattcagtctatgccaaccgcctgcgggcactcgtatcaccggtgcaactccccttcaatccgatcgtcaaaaactacatccgccgttacgtcgatacccgttacgggacaatcaaccgggtgttgagcctctcacgctactatttcccgctgatcgaggaagagctcatcaaggccgacctgcccgtcgagctgcgtgccctgccgatcatcgaatcggctctctcgaccacggccacctctccgatgggtgctgtcggactgtggcaattcatgcccgcgacaggcaaaagttacggactggagatcaattcgttcgtcgatgaacgtcgggacccggtgcaagcgacccgcgccgcctgccgttatctgaaggacctttacagcatctaccacgactggacactcgccatcgccgcctacaactgcggcccgggcaacgtaaacaaagccctggcccgcgccggcggagggacgaccttctgggacatctacgaatacctgccccgcgaaactcgcgggtatgtaccggccttcgtcggagcctcctatgcctatgcctaccaccagcagcacggtatccagagcgaaaacccgcccatgccgctggcgaccgatacgatccgcgtcacccgcctgctccacctgggacaagtagcctcgacactcgacattcccatcgaaactttgcggacactcaatccgcaatacaaaatggacatcatcccggctacgatcaaaagctacacgctggtactcccccagcactacctctgccagtacatcgccagcgaagaggagattcaccggaaggactccacctatctgaaagagtacatcaatccggccaacatcgaaaagaagaaactcgcggacgccacccccgcatacaccacctacacggtcaagcgaggcgatacgctgggtgcgatcgcccgccgttacagaaccactacggcacaaatcatgaagctgaacaagctgaaaaacgccaacaagctgcgggaaggccaacggctcaggatcccgatccgccgataatcttcgtccgatgaacacatcgaccgataccatcgtcgctcccgccaccgcttcgggcggagccatcgccgtcatccgattgagcggtcccgaagccatcgcctgctgcgaccgcatctttcgggggcgcaaaccgctggccgaagccgccgggcacaccctgcactacggcgaagtcatagacggggacagaacgatcgacgacgtagtcgcggccatctatcgtgcaccgcactcctacacgggcgaagatgccgtcgagctatcgtgtcacggatcgccctacatcgtctccgaaatcatcgcactcctgcttcgctccggcgctcgtatggcgcaaccgggcgaatttaccattcgggccttcctcgcaggccggatggacctcgcgcaggccgaagccgtcgccgatctgatcgcctccgattcccgggcttcgcacgccatggcctcgacccagatgcggggcggatattcggcggcactgggtgcgttgcgcgacgaactgctgcaactggcctcgctcctcgaactcgaactcgacttttcggaagaagacgttcaattcgccgaccgtgcacgcctgcgggagatgatgcaccgcatcgaaagcgaaatcacccgcctgacggactcgttcagactcggcaacaccatcaaaaaaggggtggctgtcgctattgtcggagaacccaacgtcggcaaaagcacccttctgaaccgtctgctgggcgaagagcgggccctggtatccgacatcgcaggcaccacacgcgacacgatcgaagagacgctcaatattgacggcgttctgttccgcttcatcgacaccgccgggctgcacgataccgccgaccgcctggaacagatgggcatcgaccgcacgcaggagatgatccgccgcgcacaaatcgtacttcaggtcgtcgatgcgacctgcccgatacctcccgccatacagattacgtccgaacagactcgcttgctcatcgtcaataaatgcgacagcccggatgcacgtatcaccgaatcgaaggtatcctccggctgcgggatcgaatatagagtatcgtcggcaaaccccgacactcttttcatctcggcaaaaaccggcgaaggaatcgaacggctccttgccagactccgcgcgactttcgacaccggaagcatctacgacggcgatcccgtcatctcgaacagccgccatctggaggccctgcgccaagccctcgacgccctgcaccgagccctcacggccctcgatgacgatcgttcggccgacctcttaagcgaagacatccgccaggtcatccaccacctgggcaccatcacaggcgaaatcaccaacgacgatattctcagccaaatattctcgaaattctgcatcggaaaataggtagtgattaccaacgattagcatatatcaccaatgattattaaggcgttcattttgagcgcctttctttttagccttataagtgatggttatcgtttatagggctttttccgctcatttttgtaccgcatttgttgctcgcttgttactctccgattttaggtcggaaaggtcgtggagaaagttgactgtggttgactatgattgacgatagttgaacaaaatggagaaataacaagagaaataaacctctaaaaagtaacgaatatggcaacaagtaaaatgaaaaccaaaaaggtatgcgagtggtgtggcacaacattttatgcccaaaagctaacaacacgcttctgttctcatcggtgcaataaccttgcatacaaagaaacggtacggcagaagagaatacaagaagtagaaaccaaagtccaaacgatcatcagtgaacaacccatatccgatttcaaggataaagaatatctatcgttcaaagaagctgcgactttattagggctgagtaaacaagccgtatataaaatggtatatgccggaaagctgcaagcattccgcatcagtagcaggttgtcttttatccgtaaaaaagatattgaccggatggtagaagctcgtccttatgaacaacgacatccgaaggacactattcccatcactgatttctataccacagccgaagtgaaggagaaataccatgtaaacgagtcatggatattcttggtagctaagaagaataacatacctcggactttcaatcgtggcaagacctactggagcaagaagcacatggacgcttactttaccaagaaagccccgaatcccgacattacagaatggtacagcacacaggaaatgcaggagaaattcgatatgaccttatctgctatctacacttttgtttccaagaacgccatcccgaagaagaaagaaggcatcatggtttattattccaagaagcacgtgaatatagccaaaggtgtggctgcacccgaagaaccactgtattatacggtagccgaagcaatggagaagttcaatcttacccgtgaccaactctatcattatgcgaaatatcataatatcccaaaggtcaagaagggcaaatacacacttatctccaaacctgaattggataagctacttgcagccccaaagattgaataagttatttatcggtgaatgttgtcaccattgaatcaccttattcctttgcaccaaacaaatgtaagactctaaatattaatcagtatgacacacacgtgtacaaaagtaacagttcgtcagagagcgattcggaataatcgcatctccttgtatctggattattatccggcagttcgtaaccctgagacgatgcagatgagccgtcgggaatatctcggcatctacatctatgcccatcctaaaaatgaaatggaacgggaattcaacaacgatatgctgaacaaggcagaggctatccgttgtatcagagtgcaatcgctcatcaatgaagagttcggcttcttagacaagaccaaacagaaagccgactttctcgcctacttcaaaaagatgtgccgaagcaaagaccagaaatggacgtttgtctatcagcatttctacaacttcgtcaaagggcaatgtaccttcggcgaagtgaatgtggatttatgtaagaagttccgtgagtacctgttgagtgccaagcagctcaaacacagcaatcgtcccatatctctcaattcggcatccggctactactctactttcagaggattgttgaagattgcttaccgagacaaatggcttcgagaaaacatcaatgactatcttgacaagattgaaccacaagatgtgaagaaagaatatctgacactggacgaagtgaagcaacttgccgtcactccttgtgacatcccagttcttaaagccgcctcattgtttgcttgtctgacaggtttacgcatcagcgatattctcaatcttcaatgggaagattttgccattgctcccgaccaaggctattgcttgcgtatcagaacacagaaaacccaaacagaagcgacactccccatcagttacgaagcctacgaactatgtggtacgcccgacacaggcaaagtattcaagggcttaaaacggagcatgattaactatccgctgaagaactggctcaaaaaggcaggaataacgaagccgataaccttccacggatttcgtcactcttatgcggtcatacaaatctctttaggcacggatatttacacggtttcaaaaatgctaacccacaagaacgtttccactactcaaatctacgcagatttggtcaatgtaaagaaaagagagacagccaataagatttcattaaaatgaatatagccatgaaacgaggaatcataacaaacaacggacatggcatccatatttctgatggagaagtatggatgaccgcttgggagattgccgacttgttctatacaacagttggatcaatcaattcccgtttaaaagcaatattgaaagccaacgtcttaaaggggtatgaagtttgccaatacataaagttggagaatgggaatagtgccgatgtgtataatctcaacatgattatagccctatcctatcaaatagacactggacattctgctgaattcagaaaatggcttatcagtaaagttgcctccaaacaaaagggcatatctctctttattcctataagcgcagctaacatacacaattgctaatacctttgctaaaagtccaacttggttttttttctacgttggacttttcttttctattttggcacagttgacctagaataatactaccttttggtgacaaatgctgccactttcagggaaatgtatttatacatcttgctaatgatatatatttgcacacaaacgattagcatatattattatgaagcagaaaaagatagaacatattactttgaatctgattgttttcgggacaatcgctatcattggtgttttagcccgccagaccgtacttcactatggttgggatgagttcagcagttacctcattttagtggtatgctccattatcatgggagctatctatctcaatctgcaaatggtattcagtcaaattctttcgccaacaatagaaaagtgctttatgagatttgagtgctaccgcaataagtttgtggtagttgaaactccaattgcacgcgctgaacttgtcgaaagttctattatttcggaatcctgcatttcagaaccaaaaattgaaatagaaacgacatctgacacaacagaagaagtttctatttcatcgtgttccaaactcaacgaagaagtggcagagcttccaaaggaagaagccacaccttctaccatcaacaatatatccatcgaagaatccaatcagccaacagaatacgagatattccgtgccaacgctatggctgaaaaagaacgagcatcgcaagaaaaattagataaagttctctcatatacgaaacagaacttggctctctaccttagcgaaactgatctcaatcgtctatgtggatatatcacggaatacttcctatccgattccttacctaaagtggagcagataaaggttgacactcaattaagaaccattgacatcatgcactttggctggaatataggtaaggcatttggcaagccacgcctacagactgccacatttataaagaaagtattcgctcatactctacgtgattcggaaatatccaccattgagcgcaaaatgtcgcatacggaatcagagtgcaagattaagctggatagaaaaattgcataaatagcccttatacaattatctttttactatctgatttcaaatagagcatgtgaaaattacggttttcatactgctcttaaaaagagactaatgaagccccccagatggtaagtttttagttaaggatattcatcattgtgtgcgtacaatagtatgcgacattgcatcaatgcgatttataacttcattgaattcagcgtcacaatcatgcctattttgttgttctgcttcatctaagccaatatgagcaaaatacaaagcttcatttatgtgtcccattgagaaatgagcaactgaaagatttgaaagattttgtacattgtgaggctgataaaggagaacggtgttgaagtcatttaatgcttgcggcattttccctatgagcctatatgctattccacgttgaaggattgccattataaattccggacggaaggttggttcaatgacatttgtcaacacttccgctgcctctgcatttttattgtcttcgcgaagtaatgctgctttgttgatattagaatcataaaaatagggcattatcttgatacagtgattgagatatgccatacatttctctttccataattcttctttcttctctttggtaagtttagctttgttatagtatgccattgctaaatccggattgaatgttaatgccctatcataataggcatcagccttagcatattcacccatcgcggaatatgaattggctatattcatcagcaagctatcatcttgcgggtcaattttcaatccttctttataaatttcaatacttttgagataatccttcttcgtgacataataatgtcctaatgcaaagaaagggacaactgtcttggtatctagttttgcagccatctcgaaatctgataacgctttgtcatctcttgacaacataagataagcattccctctacagatatacacataagcataattaataccttcgatatctccgcttgttcttaggaaatgtgtatattcttgaacctgcctaccaaaatcgggttcattggctattcttgtaagagtatcgtagaagttttgtctgtatgtactcttatccaaaattcgcttaatctgttcctcggcttgctttacaatatctctctgggctttgtcagcctccagcatcacctcacggttcttggtctcaatgctatcgaacttgtcgccaatgctccgtttcatctcattgagctcttgaatcttctggtctacattccaaagggcaagaactgagaatactaaaaacacaatggtggtgactgtaccccataatgaaatagcatcactgggagtcagttcagatatatgccaccctaaacccgtcgtgtggaaccatacaaccagctcaacaatagcaaattgcagtataacaagtaaaaagtatttcagatatttcataaaggaggttttaaaataaataatcatacttgctctattatttttgcacgtcacaccacaaataggcaagatttgcgtaaaaatacgaataataaatggaggtcttgtcaaatcttatcatttttcttttgatatctgtttatcccctaataataatcaccgttggaggaattaaaaacactgagacgcagaatactcccagcaactaacatagccaacattactacgcattaaatattcacttattatcaataacttaccaccaataaccaccatcaaaaagttattcatcagttatattttggtgaatgattccaccattgaaacacctgtttcctttgccatcgaacaattaaaaacgattggcgtatgcaaaaagaaacagtaacatttgataagctgcccgaagcggtaggttatctgaccgaacaggtcatcgagttgaaaaagatggtagcagaactccagccaccagcatcagacaaacacgtgttggttgaaattgaggatgcttgccgtatcatacgaaaagccaagcctaccatttatacattggtacgcaaagggcagcttcctgcctataagaaaggcaagaaactctatttctacgaagacgaacttctgacatggattgagaatggtcgaagaaaaacttccgagcaaacatacgaagagatgcttgccaatatgcaagacggtgtccgtcataaacccaaatcatccgtgaaactttaatagatgtagctatggatacgtattctattaatccggtatctatcattgatgaagcgattgatttaagcacaagattgtccggtacggcattccccgtcagcatattcccaaacaaaatccaacgcatcatccgtgaagtacacgaatgccataactaccctactgactatattgccgcagccatcctcacggcaatagcagttggcataggcaacacgcaccttgcccaaatcaagcaaggatggacggagagccccatcctatatatggcattgattggaagaccgggagctaacaaaagccatccgctcagctttgcgatgaagccgtttcttgattatgattacaaacagaatcaagaatttgagaaaatgcttgccaagtacgatgagctgatgagcatgagtcgcaaggaacgtgcggaaagcggtagtgagcaatttccacaagagcctatccgcaaacgcttcttggtttcggatgtaacgcccgaaggattgagcctcattcatgctcaaaacaaacgtgggttatgcttgtgggcagatgaattatccgcttggttcaagaatttcaaccgctataacaacggttcggaggaacagttttggctctcagtattcagtgcaaagactaccatatccgaccgcaagaacgccaagagttccatcttcatcaagcgtccgtgcatatcggttattggaactatccaaaagaaaatcttgaatgagttggctaaaggtgaacgttccagcaacgggtttatcgaccgcctcctgtttgtaatgcccaacctgcaacagaaagcacgttggaatgacaaggaactgctggaagatatagagcaagagtggaatgccatcattgacaagctgatacaatcagagtgccacctcaatgaacatggagagattgaaccacaaatcctttttttctcagaggatgccaagaaacggctttacgagtggcagcaccatttttctgagctgtgcgaccgggaaacaaacgacaccatcgtaagtatctattgcaagctggaaatatacatcatccgtttctgtctgattatccaattagcacgatggacttgcggagaatgtgataagacctgtatcgacctgttgacagtggaacgagcaatcaaactgacggagtatttcaaagagtctgcattgaacgttcaaaatatcctcaatgaaaatacgctcaacagccaacaacagacaatagtcaatctgcttcctccatcctttacaaccgcccaagctatacagatagccgagcaaaacgggatgaaggagcgcacgtttcaacgctttctcaatgacaacatcgggacattgtttcgcaaagagaagcatggagaatattcaaagattaacccgtgacatttttgtcggtattgacactatccaagcgaaaacgacaataacgacaaaagtgacacccccaaaaagaaacatacaatgagtacacatagattcatattagaaccctacaaaggtgtcagcactcggcatacttgcccgaactgtcaccgccaaagatgcttttctaaatacattgatacagagaagcaaatcaagttccctgaatacgtggggcgttgtgatcatgagcagaaatgcggttatcacttcacgcctcgtgattactttaagcagaatccatctgagaaagaaaagtttgcagagaatagcttcggaagttatacacctattaaagaagtaaaaccgatagccatctcctacatggatttggatatagtcaaccaatcattacgaggctattctgcgaacaagttatttcagtttctatcggctcaattcggagagacggaaacattgaatcttatgaagagatacaaggttggtacatccaagtattgggatggtgcaactgtattctggcaaacggacaatcagagtaaagtcagaactggtaagataatgctttacaattccgaaacgggtaagcgaataaaagaaccatacaaccatgttacgtgggtgcactccgtattacacaaaggtgattacaatttgaagcagtgcttcttcggtgagcacctgctttccgaagacaaaagctgtccagttgcgctggtcgaaagcgagaaaacggcaattattgcatcttactatctgccgcaattcctatggatagcatcaggtggaaagaacggttgcttcaatgtcaacagcctatccgttctggcaggaagaagcgttgtattattccctgatttaggtgcaaccgactattggcagagcaaaattagcctgatgaaaagctgcggaattgaagtacaaatgttcgattatttggaagccaacgctaccgaagacgaacgcaaagaggggtacgacatagctgattatctactcaaagtgaagcctgacgaagccattcttcaacaaatgataaggaagaatcctatcttgaaaacactgatagatacattcgatttaaagctcatcagcgtacaacaaggcactccacgaccgaaggttttaccacccaagaagcgaggattcagactttgaactcagggagaagaatcgagacttttttactgtagcaagttaatgtcggtgtattacattccccgaccacttgctcctcaaaaagtctgaggaggcggctcccgatggtcacacattattcactaaaaacagattcaaatggaaaagaaatatacagtaacactccgtctgtcatatcagcaatacgcatggcttggtgcgctttgcagacggagcaagcagactcaaagcgaagtgatccgttcgctcatcgaaaacggttcggtacgtgaacgaatcacgcaagagcatattcacatcatccgtcaactgattggcgaaagtactaatcttaaccagttggcaagacaggcaaacacctacggtttcttcgccgtagctgacagatgcaaggaaatggctcagcacattaacctacttataaaacggttgaaagatgataggtaaacagactaaagggacatcgttcggtggctgtgttagctatgttctcaaagaggagaaatccaaattgctggaagcagttggagtagaaggtacacccgaacagattgcggagcaatttgagttacaatcgctactcaatgataaggtaaagaatattgtcggacatacttcgctcaacttctcaccagaagatagcgaacgcttgaaacatgatgatgaactgatgttgcaaattgcccacgactacatgaaactgatgggaatcgaaaacacgcagtacattattgcccggcacatcgaccgtgaacatccgcattgccacatcgtctttaatcgagtggacaatgacggcaaaacgattagcgacaaaaatgactttcgcaggaatgagaaagtttgcaaaatgttgaccgccaaatatcgcttgcattttgccaatggtaaagaccatatcaaggaggaacgattgcgcccttatgaccgagcaaagcatgagatatacaaagcgttgaaagaggaactgtcccaagtacaaaattgggctgacttaaaggatgcacttgccgaccgagacattgatatgaaattcaaggtcagccgaactacacgggaaatacagggtgtaaaatttgagtacaacggtttttctttctccggctctaagattagccgagagttcagctacttgaatatcgacaaccgactagaagagaatgcttgtgcatccttgtttgaatcacccaaacaggaatccagacataaggaagaaaatgtacaacaaagcgtttcccattccgatgatggctcaagcatcagtctcggcttgctaaacggcaactcatcctacgatgccactgccgcagaagaagccgagttcaatcggctgatgaaaaagaaaaaggctaagcgcaagcgaggctttcatttataatccactttttattaacactttaaattcaattatttatggaagatttgattcttgatttcaatctctacttgtgtgagaagttcggctacagaaacagttgtagcgtgatgcaaaatgccaatggcttttgtgtgaacatcagtgaacgtgatctggactgctacatccgcttttgggagtatagttgtggaagaggcaatttccccgactggtctatcatcattgtgcgcagtaacttcaagaagaaccaagaagaaagcctgaaagatttggctcgcttcttcaaggagtacatgccacgctacggttacaaatacctctgtaccgaaggtgataactacaagtattatcagacactcggtttaaagctcatctatcgaggattctttgaccaaaacaattatggattgccgatgaaggacttaaatgtctgacacatcgtttagaatcgaggagggggacttttcctctccttttcttatataccgataaatcagaatttagaagcgttggcaaagcaactctatgattactggtttgtgcagtttgactttccagatgaaaacgttaatgttttcatggtctgtaaagtttagagttattccccattacttgtaaaaagataactccattcataaccaactaaaaaggcggcatatctccatgtaagaatagctttccgattctatataatgcaaataattctatgctgttatatggtttcgggcataaatagggagcggtctgttttatgtggaatcctattatatgtaatggataaaaattcggttttccatctgaaaagggggaggggtgaaaaatagggattgtccgctcggtcggggtatatgtaccgaaaaactccgaccgacttttcagccaatcggagttgcgatattattccgcagcaatctttttccttgcaacgagtttatcccttatgatggtgtagcactcggtgttcttgccgtcgatgttcttataacctttcgcggtatcgaatcattggacaatatccgtcgcttttgctctgcgctcaacccccaaatcgtcgtatatggtctgcaatctctctttaatgattttagagggtatcgcctttccgtggggcaaatcggcatttatccgtttgacgattttatatgcgagttcgtccgccgagcatttaatcagttcgcgccgtatctgcgtctgattgtatttgagttcccgcacccgctctgtccccaatatctcaaaggcttgttttaccaacgggttccgccgctcgataagcgataatgcgaacacgtccgtcgaaaaaggattcgtgtcggacgctttgagttcggcgtatcggtcgaacaactccttaaacggtatcttggctttggcgttcttttccaacttggtcagtcggatgtcatgccgttcggcggctgttatcttgttgtcgttacgctcgtattccgtaataaggttacggctgtcggcataaatctcggcatagttgcggaaattcagcagttccaatttgattcggttgcggtctatggtcattgtatcggtattgatgtatttgttattggtgtaaatcagattgcgtaaatcttcatccgccgtcgcatatcatttcacgaagcgttcggccttatccaattctttttccgttgcggctttgaattgcggataggtgatgccctcggcgtatcgtaccgtcgagaagatgtgcgttatctctttgtaacgcgtatctcgtatgcgtcctgcaatctgccgtatcgtcgtggaaacgtccagcaggtgatgtcgtgccgtgccgtcgctcacgacgtatattttgccctgcttgtcgtaaatgtcacacccctcgaaagctgtcgaggtgtagaaattgattttgcgcaccgctttgtcgggaatccctatcgaataatctccgcctaatttctcgcggtttatctgctcggatgtcccgcttgtcgaacagacgattttcacctcgtcgggcgaaagtcgggcatgatgtaacacccgcccgataaaatcgacgctgtttacaaagaaatgcagattgcagggaatattgtgcgttacggcattgtggcaaagatttacgaccgatgccaacgggctgttttcatgccacaaccgcacctgcatcggcggttcgctgggtcagacaatccgcgttgtcggcaaggtctgcaattcatccagcagaaattcccgctcgatgggtgtcgcggacatataagtcgcacggctgaatttgagcatttcggcaagcaatcccgtaatggctcggtgtcgaaatgaatagtcgaacagcaggcggtgatattcgtctaccaacagcagggctttggcgtatatctccgctcctgcaatctctgcgacacgcggaatcgcatcataggtggccatgatttttcagcggtcgtgcgcttttagatagtcggctatctcttggttggtgacaccgccgtaaacccccagcaggtcggcgtgttcgggcagtttgttcttgataaggttcaccgtcggaacagcaattaaggtcggcactcggttctcgatggcaagtgtcgttgccccgcatcccgtcttgcccttattaaagatgcagtttgcaggtaattcgttgtcgagttcggggatttgctggacgtggagtgcgtccgagggtgctgtaatgattgaattcataagtaaagagtaagggaaaaattacgccgcatattttttgtgcgggtaacatctttattagtaaatttaatttccgacacactttttatgcggccgcattttttcggtgtggaaagtatctttataaggagaattgatttccgacacaaaaaatatgcgagcagggcacaaaagcaagggacaccgaaaatgtcccttacatgaccttacccttacttgtcggattttcctctctcgtattataaagatagcgccttttttattgacaacaaaggtcgaacagcaattaatccgaacatttttatctatgtcttaaatggcattatagggctgtttacggggtggcggagtgtgttcgacgtggaaattaatgtgcaaaaagtagtattagcgggtattttacatagtctgttgttctaaaacacctttcgtgtcatgtaatttagcattattagcggttcggtacatggtgcggctgttctgaaattcctttcgaacacgtgttttaagtgctaatagcggtttttgcatggtaaataagtgcgatgtacgcataaaaagccgtaaatttgggtgtaaaacgctattttatgaatgaaaaggaggccgatgccatccgtaagagtatgtatgaatccttactgatggatgaaaacgataagattgtgcattgggatttcgacccgatgcgccgtgagttgcgcgagtatgtcgatattgcctgcggatgtgatgaacagacgtatggaatccgcacgccgcagtttgaatatcgctactgtacggggaagattaagatgccctttgccaagtcggattatctcgctaacgacgatataatcgctacggttaagggattggggctggatgtcgagaaattttggtttgcgctggtctttatttacgattatgtcgaaacctcgtttaagaactgcggtcttgtgaaacccgcgtctttggataaggcggtgcaaaatctgttcaaagagttgggcgaggatttcgcggacgatgatattgaaataacccttaaaaagaacagaaagaaagtcgaggttctgcccgttataaagcgtgggattttgggctggctgcgggaaacctatgaacgggaatgcaaaggcaggaagattcagtattacgggattgacacgggtaatttcgacgaaacctatccgagtacgtcgtttcggatttatcggactgtggagatgtatcgggatatgctgaacactttattgggggacaaccgcccgaagcaacccgataagagtgtttcgttgaatcggctgttgctgatttcgcgtatctgttacctctatgaatttacccgtaatgacagttttttgtatagcgacgattcgttaaaaggaataattaagtcctgcaaggggcgtatgcctgcgacttattccgctgtttatctgtaatttgcaaagggagagtaaaaacgccctttattttgctccccgtgaatagggtgaaaattagcaaatctttgtagtgtcgaaagggataaacccgacgacctgcaaacgcttgggcaagggatgcagcataatttaagcccctctgtaaaaggagtatttaagattatgaacactattattggaaaaaacaacgtaaacgagcagaccacggcaaacgccgcaaccgctacgcctgctcccgttgccgaacagaaagaacagcagactgcgcagacctcgcgccgccgccgttcgactacgcccccgatgtggcgggtaatgacgcaggcgcggcccgttttcgatgtccaactgaaaaaggataacgaaataaaattggcctgcatcaacaaatttatgaatgcggcttactcggatgcgaacaaattctgggctgatttcatggagcaggtaaatattctgcttgacagccgcaggtattgccgcgagtgcaaaatcttgggcttgaagcctgaatatgtagcggaacatattgtgttcctcggtagtgccacgatgaaaaaggtgctgaaagacggtgtatcccgtacattaggggctgatgtgcaactttacgggaaacgcttctcgcccgaagatgcggacaagtttctgtcggaagatataaaacgtcttcccgaacaaacgacggtcgcctaatttcagccagccgtcgttgaaaaaaaaggacactccgtatattcgtcggagtgcccttttttgttcacaatagattctgcatggccgcgtcgatttggctattttcgaacgaatccaaatagatttgagtggtggataaatcggaatgtcccaacgattcggaaatgatagcaatattcactcccgaccgttttaagaccgtagcaaacgtgtgccgagcgacataggtagtcaatggcatttccaatcctatttgctctcccagcgtctttaattctcgattgacttttcgcaaaaccttatgcaggcgattgaaaatctgctgtggggtggtgtgttcatggcgattgaggatagggaagatataatcttctccgtgtcctgccataccgtacttttcgagaatctgcaacgccatagggacgagttgaaaggacagcaatttctgcgttttgtgacgggaatagtttacacggcctttaacgatgtccttataacgcaaccgtgcaatatcgccgaaattcatccctgccgtgaaataggagaatagaaataaatctttggcaaggcgtcgatattccgtcgtgtgtccctctgtaatttcaaggtcgattaaccgttggatgtcatccttgtcaattgcccgtttgcgggttttggcccacaaactgcccacttggtagatgctgaacgggttttgctttaccgctactttaccctccttgacagccttgttgtagatggctttgaagatagcgaaccgtgtagcaatgctgttgtccttgttccctcgttggcgcaggtgcaattccaaccctttcagatagtcgaggtcgatagcctccaatgcggttttgaccgatttgtagccgttcagcacttgcagggcgtatttgtgcttggtggctgagttgattttaccgagcgattccagccgttcgatttcagcgttgaaaccgtcctcgattgtaattcctgcgtggcggctcttgtcggtttcgaaaagcgtgtcgaatgttacgggaatatccaatgcttccagcctttgaatcttcttacgatagcctgccaacgtgctgtctatctgactttgcagggcagcgcgttcggggcagtttgccgttatcatttcggcggttttgtcccaataatgcggctctaccgaaatgccgagcgaaacggtcttgtgggtgcgttggtgcgtaaagcggattgccaacggggatttgccgtttttgtaaacgatttcatgacggcagattgctttgattttcatctgtttgcgtattaagcaaacagcgctgggcgtctaaattttatgtgtaacattatgtgtaacattgcctgtctgaatcgctctttcaaccctcttttccctcgccgaacggcacaaaaaaagagattacaaaaactgtaatctcttgattgttagagccgaaaccgagatttgaactcgggaccccttcattacgagtgaagtgctctaccgctgagctatttcggcaatagggagttttgtgaaaccctttcgggatgcaaatatcggaaaattttttgaataaaatcaaatggtaaggactatttcttggaaaaagtgcgattttttctctcattcttgctatcttcgccccgaaaatttcgtatcgccatggtttcggaggtcgtacggaccggaatccgaatcctcgggaagataaaaaattacgaggagttaatccgctaataaacaaaaccgtcatgcaagataaggctacgctcaatcctactccggatcagacattcgagatcgttggtcagggggcgtatgattttgtacgggttctgacccattccaaacagttgcagcgccaggggcgggtcgaagaggcctgcaacgaacgctttcacgcctttcagcgcatttccgaattattgcccgaagacgaggaggtgattctcgaatgggaggatcccaatacgcgtgcggcgctcgaggtgattcacgcttcggcgatcgaccatttcctgatcaacgatttcgaaatgtctaccgccatgctcgaattgcttctcgaactggatcccgaagaccatctggaggcaattatcctgttggcgttcaattacctggcaatggaggagtacgaacttttcgacgaggtgagcaacgatatttccgataaatacgcctgcaaggaggtgctgaccatgtgggcggcttttcggcgcagcggccgtattcccgagggcgatgcgatccgtttcaggacccgattcgcaccctattttgccgaatttaccgccgacgaacatcctgccgacgggcagtacctggaggatatcgagagcgagcgcccttcggtgcaggcccaggctcgtgagctgtggctccgcactgaaaatctctggacgctttttcccgattttattgcggcgcttcgaaggtagcccctcccgattttctccggggcgaagttgccggcaagggcatatatgccgtctatcgtgcgagttgttatgagaggagggcgatttgcgaggggatttccccgattttacgaatccgaccggcgtagttcgtcactcctttgtccggtgtgtgcgagccttccggatctttttgcaagagatcgaatcgaagttttcgcccgatcggaagccgatgaatatcggggtaattaaaatgtgtatttgtaaaaaagaaacaccggacttcatagtccggtgccttgtttcttatccgatcgtatcgaccagtttgtagagcttgtcgccccggcggatgagttggacggttttgaccgagcaggtcgttccctggagtactgtttgcacggggtgctcgtccaagaagatttcgtccccgtgctgttcgaccactccggtcgtttcgcccacccagagcagttcgtccccttcgtataggggagccgcttcgacgagcacctcggccaccgatatttttttgaagaagttggtcaccttgcccacatagactttgcgtttggtggcggccgatccgtggtggcggctgtgctccacgatcgggcgtcctgcgtagtatccctcccagaatccgcgattgaataccgttgccagccgctctttcagtgcggcggccagttccggcgtgtagtcgccgtcttccatggcccggagcgcccggtcgtaacattcgaccacgcgtttgacgtattccgcaccccgcgcacgcccttcgatcttgaggacccgcacgcccgattcgatgaagtagtcgagaaagtcgatcgtgcagaggtctttgggcgagaggatatagttgccctcgacgtcgagtgtttcgcccgtttcagggtccgtaaccagatatttgcgacggcagatctgccggcaggctccccggttggccgaaaatccgtcgctggtgtggagcgacaggtagcatttgcccgatatggccatgcagagggcgccgtgggcgaacatttcgatccgcaccagctctccgccggggcccgtgatccgctgccgttcgatctcccggctgatgtaggcgacctgcaccaggtccagttcccgggccaggaccactacgtccgcccattgggcgaagaaccggacggcttcgatgttggagatgttgctttgcgtggagatatgtacggccatgccgacgctgcgggcatattggatggcggccatatcggtggcgatgatggcgtccacacccacctcgcaggcacggtcgatggtcgcgtgcagggtttcgatctcttcgtcgtaaatcaccgtattgaccgtcagatagcttttcacgccgtgttcacgggcgatcgaaacgatctgccccatatcttccagggtgaagttggcggcggattgggcccgcatattgagccttcccactccgaaataaacggagttggctccggcgtcgatcgctgcatgcagggattcgtaacttcctgcaggagccatgatctctatgtcgctgcgtttcattgggccgaggatttatttgttgcgtccgatcaggctgccggcgtactcccgcaggcgggccgtgccttccgattgtacggataacgtatcgagaatgttcaacgcccgttcgaagcggtggttgatctgctgttcggtcagacgggcgacgcccagtttgtcgaaaacctcccgcacgcgcgcgatcttctgctgatcggaaagagtcggatcggaataggtcgaagcgaggattcgatgctcggcggccgacgccttgctgagggccatgaccatcaggtaggtctttttgccttcgaggatgtcgcctccgatcgccttgcccagccgttcgtcgccgtaactgtccagcaggtcatcctgcaactggaacgccagtcccagttcggtggcgaaacgatagaggcgttgacagtcttcttcgcccgccccgccgatgatcgctccgatgacggtcgcacccgacagtagggccgaagttttgagttcgatcatgtggagatactcttcgaccgaaaccgactcccgggtttcgaaatccatatcgtactgttggccttcgcagacttcgatggccatcgtattgaagcgggcgagaatctgcggcagcacttggggcgggtattcgctcaacaggcggtaggcgctgatgagcatcgcatcgcccgacaggatggcgacgttctgtccccatttggcgaagacggaagggttaccccggcgcatcgccgcgttgtccatgatgtcgtcgtgcagcaacgtgaaattatggaaaacctcgacggctgccgctgccggcatggccgcctggggctggtcggagaagattccgcaggtaagcatcagcaacatgggacgcaaccgtttcccgctcatcgtgagggaatagctgatcggtgcgtacaacctgccgggttcttcgggatatccgatttgtcccagataatgttcgatggcttccagaatttggtcgttgttttgcatgctgaaactcgctggataagaatcgttgaacttcgtcgtcgttttcttcgctcggcataattcgggaaattcgttttgcctgctcttgtcgaaaacattcccccaaaagtaggaaaaaaagtcgatagcgtgcaattattttctaactttgggctgataaacctgtaaaatttatcttttttatgaaaaaattggtcatcggcattgacatcggagggatcaatacggttctcggtttggtcgatcgcacgggtgaagtctatgcgcgatcttcttttcgtacagcggagtacccttttttcgacgactatccggcttatgtcgaaatgctcgtacggacgctgcgggagctttgtgcggcgatgcctgccggggctgtactgtcgggtatcgggatcggtgctccgaatgccaactatcatacgggccggatcgagcgtccggtcaatctctggaagtttcgatccggagagccgaatccggaggaagggcggcggtttttctcgctttgcaaggaggtcggcaactcttttcccgggattcccgtccgtattaccaacgacgccaatgccgccgctctcggggagatcgcttacggcaatgccgggggaatgcgggatttcatcatggtaacgcttggaaccgggttgggatcgggattcgttgccggcggtcggatgatctacgggcacgatggcatggccggagagctggggcatgtcgtcgtcgaacccggaggacggcaatgcggctgcggacgccgtggctgtctggaaacctatgtttctgcgacgggtgccaaacggacggccttcgagttgatggcccgggaaacggtgccgagcgttttacgcgatgtaccttacgacaagttcgacgcccggataattaccgaagcggcgcaaaagggtgattcgctggcgctcgaggtttttcgctgtacggcggagaggctgggaagggcccttgcgaatgccgtagcgatcacctcgcccgaagccgtgttcttcttcggcggcctggcccaagccggggagctcctgttggaaccgacgcgccgttacctggaggagaatttgctgcccgtttaccggggcaacgtgaaggtgctgcccagcggcattccggcccaaaatgccgcgatcctcggcgcttccgctctgatctggaacgaatgattcttgcagggatcgttgcggattccaggtgtaaatatcgtcgcaaaccactctgtgacagaaagcgtccggccttgcaaggccggacgctttctgttgtctgggtcggacgaagccttatttatcgcatcggcagctcgatcgagccgatcaggaacccgtcgcaatagatctgtacctggtaggtaccggcggtgaagccgctgccggtgtagaagataccgatgttgaggtcttcgttctggtaatccacgtcacgcgatgcggagtaagagaggcgttcgccctcgaattcgaacgtcggaacgctttcgctcgacagcacgtatccgtcgggcgacaggatgcggacgtagatcgtcttttcgcccggagtcgccagggcgttggccgtgagggtgaaatccacgcgcagacgctcggcgttcttgatgcgcgacacctccttgctgcgggcgttgagcgctaccatgcggataccccgggcgttgataaccgatccctggcgtactttgttgttgagctcctgggccttctcttcggccatctcggcacgcatctgggccgtggtgatctccttgcggtaggatacgttttcgtcgatcagctttttgttgagcgtgttgagcgagtcgatctggtgaagataaccccgcatgatggtacgcagcgtgccgacctctttttcatattgcttgattttggccagactccacgaacgctcctgtttgagccgctgcatcagcgagtcggcccgctggcgttcgatgcccatctggagcgaaagggtgtcgttggatagttgcaggtcgtcaaaatcctgcatcaggtcgctcaggttgttctggatcgaatcgcggtcgatgaccaacaggtcgtaatcggcctgctgctggcgatggatgttgtaatagaggaccgtgatggcagccaggatcaccgccaggataatgatgacgatgcggtagccgaggatcgacttgttcgcgcccttgcggggatcgtcgttttcgtattcgggttggttgtaaccttgatagttctcttccatggtgcgaatattttatacaaatataataaaagacggggcaatcgctgccggtttgtgtccgaaaatcgcagaacctcaccccatgttctgcaaatataatggatttttatttgattttactgctcaacggatatttcagtccgtgatatcccgaaatataggcctgaacgctgccgatgcggaccggcgattcgatgtagagaggaatgaggtttttgtcgtccgaaatccagaccgtgaactccgttccgtccgtaaacgagtacccttcggaggtgccgatctgacaggcgaacttcagggtgcggaacgtacccatactgcggattttcttggtttcacgccccagaaagcggtaccgcagatggcggatcgtatcttcgaggagcatttcgagcacctccgttttaccttcctggagcgttgccgggtcgatgctccgcaggtggaaatagagcgacacgggatccatgctgcgcggggtgagcgacatcgttttggttgtatcgcgcaccatgcggcgtccctgccaccgggtgtgtaccgtcatttcgggccagtcgtacacgtagttgctccagaaccggtagttgccttcgcggatatcgctttcgaaacggcgtgtcttcaactcctcgcgatcgaccagaatcgtatatttgtcgtccacgttcattacccagcggaaggcggggagcgttttgccgtgtgccacgatgcggtacatcggctctccttcatattcttcttcgacggtggtcacgcgtacgcttcccacttcggtattgggaaagaatttggccttgtagctggcccggtaatcgagtacttcgcccggctgatagagctgggcgccagcaggcagggctgccaggaaaaacaggacggtgaaaaaaatctgtttcttcattgaaaggttgcaaaaaagtaatttatgctgttttttacggccgttttatctgtttctgccggcgcgtttgcagatgaattgcggaaagttttcgattcggattttgcaatccgccggctcggatcgtcgttccggtgcggataaggtttgccttgtgcggaacatattccggagtgattcaaatatcctgccgtgcgaaaagatacgggagtgtttaagtgtaggaaaaaggtgtgtcgcatcggggtgaatgagtcaggatatttgagaaaaatcgatctcttctcggccggagtagcgtttgcgtagctcccgaagtccctcgtggccgttttgagtcagtgtcgggtcggccgtaagcacttcggcggccgcttcccgggtgacggtcaggatttggctgtcgagcgtcgggttggcgattttcaggtcgaaggccatgccgctctggagcgtgccgttcacgtcgcccgcaccccgcagtttgagatccagctccgccagacggaatccgtcgttggtttcgcacatcgcttcgagccgcaggcgggcctccttcgagagcttctcgcccgacatgaggatacagtaagattgttcgctgccccgtccaacgcggccgcgcagctggtgaagctgcgagaggccgaatcgttcggccgattcgatcaccatgacggtggcgttgggtacatcgacgccgacctcgatgaccgaagtggccaccatgatattcgcctcgccgctcttgaactggcgcatcgattcctccttgtcttcgggtttcatcttgccgtggcagatcgtcgtgacgtattccggcagcgggaagtcgcgcgagatggcttcgtagccgtcctgcaaatctttgtagtccatcgtttcggactccttgataagcggatagacgacataaatctgtcttcccttcttgatctcctgccgcatgaaaccgaaaagccgcaggcgggctgcgtcggtgtagtgcaccgtgcggatcggctgtcgtcccggcggcagctcgtcgatcaccgaaacgtccaggtcgccgtagagggtcatcgccaacgtgcggggaatgggagtggcggtcatcaccaggatgtgaggcggttgctcgttcttggtccagagccgtgcccgctgttcgacgccgaagcgatgctgttcgtcgatcaccacgaatcccaggttcgaaaactgtacccggtcttcgatcagggcgtgcgtgccgatcagcaggtcgatcgagccgtcggcaatcccggcgagggcttcgcgccgttcgcgtgctttggatgctccggtaaggatcgccacccgcacgtccattccttcgagcatcctctggaaggtggcgtagtgctggcgcgcgaggatttcggtcggagccatcatgcaggcctggaagccgttatcgacggccagcagcatggacatcagcgctacgagggtcttgccgctgcccacgtcgccttgcagcaggcggttcatctggtagccggagatcgtgtcctgccggatctccttgaccacgcgcttctgtgccccggtcagcgggaacggcagcctggtgttgaagaaggtattgaatacgcctcccactttggggaagaggaatccgttgtttttcgacaggcgggccgtgcggcgtgactggatacccagttgaatgccgagtagctcttcgaacttcagccggtattgcgcctgccgcagcagttcgggcgattgcgggaaatggatgttgtagagcgcatcgcgcagcgacagcaggccgtaccgggtccgcattcggtcgggcagcgtttcgcggatatgatcccgcaccatcggccagaggttgcagacgatcgtgtagatgcctttggtgccgaggacgctcgaaagccgctcggtcgaggagtaaatgccttgcagaccgctttcggccttgcgggaaaaggctttctcgatggtttcgatttcgggatgtaccaccgacagttcgcccttgaagaaggatgggcggccgaaaatcaggtattcgcgccccacttcgatccgtttttcgatccatttgattccctggaaccagaccagttcggccacgccgctgccgtcgttcacgacggccgtgaaacgtcgtttgcgccccgctccggcatagctgacgcctgtgatgcgcccccggaactggatgagtgcggaatccccttccgcgatctggtcgatgcggtagatcctcgtacggtcgatgtagcggaacggatagtggcagagcatatcgcccagcgtgcggatgcccagctccttttccagcagccgggcccgcgcctcgcctacgcccgcgacgaatttgatgtcgttgtcgagatagttcgccatacgttgtttgcctgacaaagatagtgcaagccgagagcagcgccaaatttaatcgaacgtcgccgaagcgtcgtcttcagcagggacggtaaacccgaggccgtatcggatttattcgagaaccgcctgtctttgccggtgctgcttttcgcaaagatagcgaaagctgagagaaaacgggaacttgttcccgtttttccgaggtgcatcctatcttctacaaagataatgaaaagtaagtgttcggcgacccgaacagggcggaaaaggattcgtagcagagtatcgaacttttgtcgatcggatattttgcccgattttgtccgcagggacggatatttccgaagatttttcagtacctttcggcaaataaggaggagttatggaagattacatcctgcgggagatcgacaagatcggcaaactcatcgaagcccttttgcagaaggcgggcatcctgcggagaagcggggcgggagaggccgtttgcgaaaccgcccggacggagttggcggaggcgctcgatctggatatcgacactctgctggcccgggaggactttatcggcgtgctgacccgtgagtatggcttcagcgacgagaacctggaaaaattcgccgagctgctgttcgatttcgcggccgcttcgcccgatcgggacgcgacggtccggctcgcctgcggcattacggccatttaccgttatctggacgaaaagaaggctcccgtatccctgaaccgctactacatcctcaaggagttggagaatatgactgcccgatagcgcggcgccgccgaacggtcgccattccggtttgtgcaggataaaacgcgaatgtctgttttatcctgccttcattttcactacctttgtggtaataaattctggcaggacatgaatttgaccaagtatgagcgccgcccgagccgtgaagttcgcatcggacgggttgtgatcggaggtgaccgcccgatcgccgtgcagtcgatgaccaataccgacaccaaggataccgaagcctgtattcggcagatcgaacgcatcttccgggccggaggtcctatcgtccggctgacggcccaggggcgtcgggagggagagaatttggagcggatcgtccgccgtttgcgggaggagggatgcgatgccgccgtcgtggcggacatccatttcgtgcccgaagtggctgcgatcgctgcgaaatacgtggacaaggtgcgcatcaaccccggaaattataactcatcgcacggggagttcgaagccctcatcgaccgatgccgggagcgcggcgtggcgatccgcatcggcgtgaatcacggttcgctctcgaagcgcgttttcgacgagtggggcgatacccccgaagggatggtggcctcggcgatggagttcctgcgcgtctgccgcgaaaaggcgttcgatcaggtcgtggtgtcgatgaagtcgagcaatacgcgggtcatggtggccgcctaccggcttctggcggaagcgatggagcgggaggggatggattatccgctccacctgggcgtcaccgaagcgggaaacgggatcgaaggacgcatcaagagcgctgtcggtatcggagcgcttttggcggacggtatcggcgacacgatccgcgtttcgctgaccgaagcgcccgagaacgagatccccgtggcgcagcttttggtcgatcattttgcccgccgcagcggggtgttctccgtcaaatacccggagcgctatacgccgacgcgatacagccgccgcactcgggtgcaaactcccttgattcactccgagttgcctgccgactggcggatgatcgaagccctgacggagaatcccacggccgaactgcgggccgcgatcctgagcctcgaccgggccgacgaacccgtcgcggtgtgccgccgctacgacgatccgacggtcgaagccgtcgccgtcaaagccgctgccgatctgggggcgctctttctggacgggctggcggacggcattcggatcgacgcgccgcatctttcggaaaaggagatcgcggagatcgagctgatgatcctgcaggcggcccgcgtgcggatgtcccgcaccgaatacatcgcctgcccgagctgcggccgcacgctttacgatatagagggaacgcttgcggcgatccgcgcccgaacatcgcatcttaaaaacttgaaaatcggcgtgatggggtgtatcgtaaacggacccggcgagatggccgacgccgattacggctacgtgggcgccgctccggggcgtatcactctttacaaggggcgcacggtggtggagaagaacatcccccaggaggaggcgctcgatcggctcgtggcgcttatcaaggctaacggcgactgggccgatcctgaaaatcaaccggaacgaccatgacgattctgcctgcagcctatctggggtcggtcgaatatttcgcgcacctgctgtgcgacgattgcgtcatcgacctcggggaacattttgtcaagcgttcggagcgcaaccgggcgcaaattctcgcttcgggcggcgtgatggacctcacggtgcacgtgcagcgtgccaaccgtccccgtacgccgatgcgggatgtgcggctcgactattcgaagcggtggcagcaccagcattggatttcgttggtgtcggcttaccggggatcgccctatttcgatcactaccgctcctcgttcgagcctttctatcggcgggaatacgattttctggtcgattacgacctcgaactgacggaagtgctgcttcaaaaactgaatgtgcagaaccgcccccgtatttcggagcaatacgtcgaagccgctcccggcgacctcgatctgaggcccaaacaaaaagaggacccggcgtttcatgccgagtcctatttccaggtcttttccgaccggctgcctttcgcgcctaatttgtcagtcgcagacctgctgtttgctgagggtcccgacgcggcggagctactaaggcgcagtttccggtaaggaacgtttcgtcgtataaatccccggctttcgcttctatcttcatccggccgttgagccgtaccgagtcgcagcggtagatgcacggtgcgtattgctcgaccgcgagcgtgtcgcccgagagggttacgaccggctctccggccgaagaatagacggttacggtctgcaagtcgccgttacgctcatcctcccggcgtccggtgatgtggagcgtcggttccgtgttgttccacaaagccttgtaaagatggaaagcgtccttgcggcggcgtcggtccagcgtgacgagccccgtagcctccacgccctgcggacggcgggccgagccgtagtcgaacagggtgttgatccaggttccccacagcagcgtgtcttgtgccaggtatttcgtgtaatcttcatgaaaacgggtctgccgtccttccggctgccagagcaggctgttcgagcggcgtcggcgagccggatcgccctgttgttcgatctgccccgcttcaccgtagcagatgcccgaacggagctggttccaccccgaccgaagctggccgagccagatttcgaggtcttccgtgcggcctttgtcccagccgatgttctgcgcccatacgatcaggtcggtgatctggttcagttctccgtcctggttgctggtggccgccgtcgggcggctgcggtccattttttttgccagttcgttcagtgtccgcacatagggcacggggttttcgccccgttgccagaggcagtcgaagagtccccagatgaccaccgacggccggttgatatgctgggcgatgatttcgcgcagttgctggcgaccgttcgcctcgagttgcgggttcggataataggaaacgtcgctgaggaaaggtgcccggatcagcggcaggtcgatccagaccagtacgcctgtgcggtcgcataggtcgtacagacagggggcgtgcggtcctgcgggcgagcgcagggcattggctcccaactcgcgtatgaaagcgaaatcttcggcatagtcctccgcctccatagcgctacccgtgcccggacggtcgtagtagagcgttacgccgtgaacccgaacgagcgagtcgttgaggcggaaaccctcttcgggtgtgacgcggatgttgcggaagcccgtggcgatttcgatctcatcgcgcgaggtgtcgctctcgacggatacccgcattcgatagaggttggggtgatcgaggtcccacagccggggattttcgaccgtgaaggggatgacgatgggtttgccgtcgagtttggcctttatcgttttggctgcggcctgaattccgtccggatcgaacgcttcgagggtcacgcggcagaagttgtcgcctttcgaggtgaggtggatttcggcctcggcttcggcccgttcggtcgatacggcccgggggtggatcaggactcccgacgagcccagatacagaggcgatacagcggtggggtcggtgacgatgagttctacctcccggctgatgccgccgtagatgttgtggatggacgagagcggcagcacgtcgcccgtaatggcgttgctcacggctacgcgaagcaggttttcgctgccgtatttcacccggtcggtgatttcgaagacgaaagcggtcgttccgccccggtgctcgccgacgtaagttccgtttacgaagaggtgggcgacgctctccacgccgtagaatttcaggaagagccgcttcccggtccaggtctgcggtacgtagagtttgcgctgatagtcggcggtcgttcgcaggtacgggatcgtcccggccagtgcatcgaggttccaggtgtgcggcagcgtgacacagcgggcgttgtcgctgctgttttcgtagcggaacgagaagagccagtcgtcgcagagcggatatacttcgcgggcctgcacactccaggcggcgatcagcagaaagatcagaagtaactttttcatttcgatatgtatttggccccgaaaggcattttccgtaaaaccgtattgttccggatcgctccgaaggaaccgggcggttccggagggttatcggaaacagtggcacaaagatacgaaacccggccgatattttaatctttccggacgaattaccgcatctcgttcccttttccgaggtcgatttataggcgctatctttaccgaacggccgaattatttcgtatttttgcggccggttgaaattgtcgatccatgagcgagaaatcgaaaggaaccctttgcggcatcgttgccgccgtgagttacgggatgaatcccctcggtgctttgtcactctaccgggcgggaataaacaccaattccgtgctgttttaccgctatgcgcttgccgccgtactgctggcagccctgttgttggtgcagaaaacttcgctgcgcattacgcgccgggagttctccgtgctgggattgctgggagtgatgttcgccgtatcgtcgctcacgttgttcatgagttttcactatatggatgcggggatcgcctccacccttcttttcgtctatccggtcatggtggccgtcatcatggcgattttcttcagggagcgaatttcgctggtcacggtcctctccatttccctggctctgtgcggaatcgcgttgctgtaccggggtgagggcggtgcggtactcaatactgcgggcgttgtgctggtcatggcttcgtcgctctcgtatgcgctctatatcgtggtggtcaaccgtgcttcgttgaatatgtcgtcggtgaagcttacgttttacgtgctgttgttcggcgtggctgcgatcgtgttgtattcgctgtgttgtcccgaccagcctttgcagcttctctcgacaccctcgatgtgggggggtgggcggcgatgctggctctgattcctacggtcgtttcgctggtgttgatgaccgttgccgtgcatgccatcggttctactccgaccgctgttatgggggctttggagccgctgacggcagtggtgatcggcgtgactatcttcggtgaattgttcactgcgcggcttgctgcgggtatcggcttgatcctgttggccgtcacccttatcgttgcgggcaaatccctgcatccggggcgcctggcggcgattatcgggcaccgggggtttttacgccacagccggtaggctccggtgtggaataattctacattttgtagattcacgccacaggatcggcctcgtctgttgcaggcgtattatattgtgtatgattcgcttatccggatagaacaggattggcgcggggtttgggtaaagtcctttaacccttttatggataaaaactacttatgaaatgaaaccgaatctgaaagagttgaatttggagaaactgaaaaaaatagcggccaaaacacctcgtattcgggtgaaactgactcgtaagcactggatcttcatcggctgtgccgtcgtggtgctggtcgttctgctcgtcgtgttgctgcgtccccggccgcaggccgccgcactgccggtggtggccgtcgaaccggtgcaggtcgaagatgtcagcatctatggcgagtacgtgggccgtatccgggcccagcaattcgtcgagatccgggcccgcgtcgaaggttatctggagaagatgctctttgccgagggaacctatatcaagaagggccagacgcttttcatcatcgacccgacggtctatcgcgcccgtgcgaacaaggccaaggcgcagttgaacaaagcccgggcccaggctctgaaggccgagcgcgacctgaaccgtattcgtccgctgtatgagcagaatgccgccagtcagctcgacctggataacgccatcgcctcctacgagagcgctgtggcggacgtggtggtgagcgaagccgaccttacgcaggctgaaatgatactcggctacacgaccgtgcagtcgcccatttcgggttacatttccgagcggaacgccgatatcggtacgctcgtcggtcctggcggcaagtcgctgctggccaccgtggtaaagagcgatacggtgcgggtcgatttcagtatgaccgcgctggattacctgcgtagcaaggcccgtaacgtcaatctgggccataaggattcgacccgcaagtgggacccctatattacggtcacgttggccgacggggcgcagtatccctatcggggactggtcgatttcgccgatccgcaggtcgatccccagacgggtaccttctccgtgcgggccgagatgcccaatcccgaccatatcctgctccccggacagttcactaaggtcaaactgctgctcgacgtgctcgaacgggcggtcgtggttcccaagaaggccctgattatcgagaagggcggcgcctatgtcttcgtcgtgcgccgggacagcatcgtggagaagcgtttcgtggaaacgggtccggaaacgggcaataacttcatcgtcgaacgaggacttgcctcgtatgaaaatatcgtcgtcgaaggctatcacaagctgacgcacggcatgaaggtcgaacccgtggctcctcgtgaagaggaggcgaatccagaggaggagtagcccatgaaagccgactttttcatcgaccggccggtcttttccacggtactttccatcatcatcgtcatcgtcggcgccatcggcctcgcgctgctgcccgtcgatcagtatccgcagatcgtaccgcctgtggtgcgtgtttcggcgtcctatcccggtgccgacgcgcagaccgtgacacaggccgttgctacccccatcgagcaggagctgaacggtacgcccggcatgatctatatggagtcgtcgagctccaactcgggcggtttctccgcgaccgtcaccttcgatatttcggtcgatcccgatctggcggccgtggatgtccagaaccgcctgaagaaggccgaggcacgcctgccggccgaggtggtgcagaacggtatttcggtcgagaaacaggccgccagcaaactgatgaccatcacgctgctctcgtccgaccccaagttcgacgaaatatatttgagtaattacgccacgctcaacgtgctggacctgctgcgccgtattcccggcgtgggcagtatttcgaacgtcggcagccgctactacgccatgcagatctgggtgcagcccgacaagctggccgacctggggctgacggtcaaggatctgcaatccgcgttgaaggatcagaaccgcgagtcggcggccggcgtgctggggcaggctccgatgacgggcctcgacgtgacgatccccattacggcgcagggacgtttgtcgtcggtcagccagttcgaagatatcgtcatccgggccaatcccgacggttcgatcatccgcctgaaagacgtggcgcgcatttcgctcgaagcgtcgtcctacaataccgaaagcggtatcaacggcggtaatgccgccgtgctggagatcaagatgcttccgggagccaatgcaatggaggtggccgaggcggtgaaggcccagatggaggagatcagccgcaattttccggagggtatctcttacgagattcctttcgatatgactacctacatttccgaatcgatccatcacgtctatcagacgcttttcgaagcgttgctgctggtgattctggtggtattcctttcgttgcagagctggcgggcgacgctcattccgatcgtggccgtgccgatctcgctcatcggtaccttcggcgtgatgctcgtgttcggcttctcgctcaatatgctgaccctgctgggtctgattcttgccatcggtatcgtggtcgatgacgcgatcgtcgtggtcgaaaacgtcgatcgcatcatgaacgaggaggggctttcgccctacgaagcgaccaagaaggcaatgcggagcctgagcggagcgttgatcgccatgtcgctggtgctgtgcgccgtgttcgtcccggtgagcttcctttcgggcattacggggcagctctatcgccagtttaccattacgatcgccgtatcggtaatcatctctacggtcgtggcgctgacgctcagccccgtgatgtgcgcctacctgttgaagcccgacagaggcggccggaagaaacggtttttccggtatatcaatttcggtcttgcgaaaggcaataagctctacggccgtatgatcggccgggcgctcgcccattcgcgccgtatgttcgccgccttcggcgtggtactcatcggtatctggttgatgaataaactcgtgcccgagagtttcatgccgcaggaggatcaggggtatttcaccgtcgaactggaacttccggaaggggcgaccatcgagcgtacgcgtacggtgaccgaccgggcgatggcctttctgatgcaggatcccgatgtggagtatgtactcaacgtgacgggttcgagtcctcgtgtgggcagcaaccaggcccgcagccaactgacagtgatcctcaagtcctggaaggagcgggaatcggaggatatcagcgaagtgatgaaacgtgtgcgcgacgagttgtcgcgttatcccgaaagcaaggtctatctttcgacgcctgccgtcattcccggtctgggaacctcgggcggtttcgaaatggtgctcgaagctcgcggggatgccggctatgccgatctgcagcgggcggtggatacgttgatgcactatgccgagcagcggcccgagtttacggggctggcctcttcgatgcaagccgatattccgcagctttatttcgacgtggaccgcgacaaagcgcagttggtcggggtttcgatgtccgacatcttctctacgatgaaagcgttcacgggttcgatctacgtcaatgacttcaatatgttcaaccgtatataccgtgtatatattcaggccgacgcgccttatcgggcttaccgcgacaacctgaacctcttcttcgtacggggtgccgacggggcgatgattcccgtcacgtcgctcggtacaacgcactatacgacgggtgccggtacgatcaagcgtttcaatatgttcaacgctgcgaccatcacgggcgaagcggctcacggatacagttcgggacaggcgatggacgagctggaaaatatcgtgcgtgagaaattgcctgcgtcggtgggcgtcgagtggagcggcctttcttaccaggagaagcatgtgagtggacagacgggtcttgtgctggcgctggctttcctgttcgtcttcctcttcctcgccgcccagtacgagagctggtcggtgcccgtcgcggtcattctctcgctgcccgtagccggaatcggtgcctatctgggtatctgggtttgcggtttggaaaacaacatctattttcagatcggcctggtgatgctcgtaggtctggtggccaagaatgccattttgatcgtagagtttgccaaggaggaggtggaaaaaggccgcgacgtggtgtcggcggcactcaaggccgcacacctgcgtttccgcccgatcgtgatgacctcgctggcgttcatcctcggcctgctgccgctggtgttcgcatcgggtccggggtcggcgagccgtcagggtatcggtacgggcgtctttttcggtatgctggtagctatctctgtcggcatcgtcttcgtgcccttcttcttcgtgtggatttaccggattaaagcaaaactgaagaaacgatgaaacgagttgcgatatttgtcattttggctgcactgaccgtcggattctcttcctgttcggctgtgcggcactgtcaggcccccgaggtggagatgcccgggcagatcgcttcgggctataccgattcgctgaccatcgccgatctgagctggtggcagttttacggggattcgacgttgcgccgggtcatcgagctgaccttggaaaataacaaggatatgcttgcggcggcggctcgtgtggagcagatgcggcagttgtatcggataagcaaggccgagcgtttgccgaatttttcggccaaagggctggctgattacgaaacgaacgattatgccgacgaggagtcgagccgtgatccggagttcagtgccaagctctccgtcagttgggagctggacctttggggaaacctgcgctgggccaagcgcaagggcggggcggagtatctctcttcggtcgaggattggcgtgcgatgcgtatgactctcgtcgcggaagttgcgacggcctattttcagttgatggctttggataacgagctttccatcgtgcgtcgtacgctccgaacgcgcagcgagggtgtgcagcaggcgcagttgcggttcgagggcggtcttacctccgaaaccgtttaccagcaggccaaagtggaatacgcttcgacggcgaccctgattccggatctggagagcaggatcgaaattatggaaaacagtattgcattgcttatgggaaaatctcctgactgggaggtgttgcgcggtcaaatgaatatcgaagccgagtttccggacagtctgcctgtcggtctgccttcgggactgttgcagcggcgtcccgacgtacgggcttccgaacaacagttgcgttcggcgatggcttcggcggggatggcctatgcagatcgttttccccggctgaccttcaatctggtaggcggttgggagaacgatgcgttgcagggtttctttcgctccccgttctcgtatgtggccgctgcgatcgccgctccggtcttcggcttcggacgcaagcaggccaaatatcgtgcggcattggcggcatacgacgtagcccggctggggtacgagaagaaggtgctggaggttttcaaggaagccaacgatgcggtagtcacttaccgtaacgtccgcaaaacggccgcgttgaaggtcgctctgcgcgatgctgcccgcaaatacgtcgaactggccaatttgcagtaccggggcggcagtatcaattatatcgacgtgctggatgcccagcgccggtatttcgatgcccagatcggtttgagcaacgccgtacgggacgaacacctcgctttggtgcagctctataaggcgttaggcggcggctggggagtggtggcggaatagctttctgttgtcagatagtcggatttagcattaaaaaccggttctgaagggttgtatgacagtttttttgatttttgtctcgtaaatttccgggcaaaaattttgaggaataaaaaaaaccgtttatatttgcactccgaaataccactaatgcggaaatagctcagttggtagagcacaaccttgccaaggttggggtcgcgagttcgagtctcgttttccgctctgaaacgcagaggacaatcgaaaggttgtcctctgcgtttttcagtgtattgaggtccggatgaatgatcctgtatctcgtctttcgaggggcgggagtatcaataaaagtttgcgaaattacctgtcgaagcgctggttcgaattctgtttccttcttcatgaaaagatggtttattattcgggagaagagttgatgctcctgcgtgattccaaatatattatcagacgggatacggataagttcagagaatttttgaggaaatggagagtccgttgttcctgtttgacaaggcaatggaaagatttttggcaataaaagaaaaactcctgcttgtcaccgacaggcaggatataattggatccggggaaatattttgagggaccgaagccaaaagccttttattttccggcagataacggcgtctgtttcactctctttcgggaattatcgctctaaaaccgactgttggctctggccgaccagtttcccgtttcgatattcagtcggagaaatcccgacgtactgtttgaaatatttgccgaagaaggattgggtcgaaaaattcagttcggaagctatttccttgatacttaagtccgaggaacggagcatctgtttggcgtcggcaatgaccatgcgaatgatccactgcagggccgaaatgcccgatttctctttgatgattgccgaaaaatagcggggtgtcagatattgttcctgggcgtagtaggttacctcccgttccatgcggtgattctggtaaagagagattatgaagttctggaacacatggtctttccggtccttgtgctggggctgttggggttggcgtgcgaaatagatgctcagaatttcataatagagtacttcgcccattgccgttaccaactcgtgattgatgatcttttgttgcgtatttgtcaccgaggtgtttattgccgcaatccgcttccgcaatgcgtcgatcaattggtcaatgtgtacgtattgttctttcgtcagagacaggcaggggttttcgtagatgaaaaaattccaggtcggatggaatgtctttttcgcattggtcaggacgtaatctatatcgactgtgagtacgacgcccttcagatccttgctcctatgttttatctgaatggacataagaagaggagagatgtatatgtctccctggcggatgtgatatgtcttgtcttcctgaatgatgtcgagttccccgccttggcagaggaaaaggctgcatttatccgttcgggagaaggtataaccttcttcctgcatggtggatgtgagaggtggaacagtagaaaattctactggagtcgtcatagaatacggttttttgtaatttggtcgcaaaataggaaaaaaggatataaagcacaaataatatacaatattccgtttgataatcgtacaaataggataatgaataaacagaattaacctgccggatttcccttgcgaaggcaataccgttgccgggatttcatgattggaaatcggaactgtttcgtcggatgtttgtaccgatggtttttcgttttccctactcgttgtcgggtggggagaaaggatgaccggacgcaactttcgtagagaaactgcgtccggtcgtcggaaggagatgctacgggaggaggtttttcaaaaagcgacggatggccgcccatactcctgttttgcggaacactacggtcaggagtattccgagtgcgatgccggtaaagagcgtgcgaaacagattgccggaagattttttccgggtcgtcgaggcgtgtgtttcacgcaggagggtcgtatcgcgggcgaaggaggaaaggtttcgcagaccggtatggcttgcgaggctgtccgattgccgctgccgccggaaagtctggtttgtcagcagccatgtacgccgttccgctcggtcgcttataccggtgacgatgagcgaatcgtcctgtttttcggctcggatcgcggcccgtccgctgcgggcggtgtaggccgcacccgggggaagacgttcgaggtctttaagcgggatcgccagccgggtccggtccgtcggcagggattcggtcgcgatcagcagggtccgtgatgtcgagtcggactcctgttgctgttgccgtagttgtcgtacgaggctgtcgcgttgcgatttttcgacgcttcgttccgaatgtattcgggtctgtatgtccgaggtctgcgtcgtggtgcgggtcgtcgcacatccggctgccgtcaggagcagcagcggcagcagcacgggccgtttttttcgtcggggaggtttcatcggtttttttctgggttttgcggttgaagtttttgcggagcccttcgacttcgcgggtcagtttgtcgattttgcggagcagttcctgttgggcgaccagccagtcggctttttcccggcgcagggtgacgttctcctgcagtacgtcgttgtacttttcgcacaacaggtcgatcgagcgctgcatgtcggccagcatgtcgttgcggcgcttgcggcggctgaccagccaggtgacggttccggccagaaagccgctcggcagggcataggtcagtaggtcggtgataagtgtcgggttcatttcggtagttcgtgtcgaaggaggttagagaatgccggtttcccgaagccatgcctgcacgtcgaacgatgggcaggctttggctgccagttcgttatgccctacgacggctgcgccgggaaatcgggcgacgaaatcccggacgtagtgttcgagggcgctcttttgctgcggagtgcgggtatcgcagggggtcgtgccgtcggcggcgactcctccggcgtatgcgatgtggcggctggtggcgttgtagccgcaggcgccgttggtgatctcccagggatcgaccgtgcggtcttcgttgttgggaacgagccgttcgacgctgccgtccaggtggatgaggtcggtataacccacctgacgccagcctcggccgccctgggaaacgggggctgtgtgccacctgcggatatcggcggcactcacttcgcggccgggcggcgtggccgtgcagtggatgacgagtctttcgagttttgccataataaaaaagtgtgaaaggggttggaatcggggcgatgaccggattcggacgggagtggataaggttccgcccgaggagacgggagaaggtagcccgtttcggattgggtcggcgaagcgcaggacttcggggcggggtgacggtttccgcttttttcggaaaagcggggagaggccgatgggtgtttgcaaagataacgggagacgccccggaatacaaatcggagggacatcctgcggcttttcggcggcatgatgtcggtttattccgttgcgatgcggcggatttccggtttttcggattatctttgaaacggttcgacggctcgggatatgaaatttccgaaatgcacgtttgttgttcgatatgaaacgtaaaataattcgcactatgatcgttttccttgcagtcgcggctctgttggtcgcggcgatcgctctttttatgaatcgacccgaattcggacgtgctccgcgcggggagcggctggaacggatctggcgttcgcccaattaccgcgacggcgctttccgcaaccggcatgcgacgccgcagctcacatcgggaaagggctggtgggctacgatgtacgacttccttttcgagcgtaaggagcgcaatcgtcccgatcatgcgctgcctgcagtgaagaccgacctgaaagcgctcgatccgaaagagaacctgctggtctggttcggccactcctcctacctgattcaggcagacgggctgcgtattctggtcgatcccgttttcgaaacggcttcgcccttgccgtttttcaacagacctttcgaggggaccgatctctataaacccgaggatatgcctgggatcgacctgctggtcatcacacacgaccattgggaccatctcgactacggcacggtaacgaagctgcgcgaccgcacgggccgtgtcgtctgcccgctgggtgtgggcgagtatttcgaatattggggtttcgatccgcagcggatcacggagctcgattggggcgaacaagctgcgctcggcggcggctttacggtatattgccgtcccgcgaggcacttttccggacgtacgtttcgggcgaaccggacgctgtgggcttcgttcgtcgtcgaaactccgtcgcagcggattttcctcggcggcgacggcgggtacgatacccatttcgccgacgtcgcacgcgagtttccgaatctggatgtcgccgtgctcgaagacggccagtacagcgaggattggcgctatatccacatgcttccggccgatctgaagcgggccgtagaggacctcggcgcccggcgggtttttccggtgcacaattccaaatacgctctggcgcggcatccctgggacgagccgctgaacaatgcggctgcactcgcggcggagaatcccgaggcggggatcgtgctgccgcgaatcggcgagccggtacgtttggaccggtccgacacgctgccgggcaggtggtggacagctcccgaaaattgaaagagagcgaagatcagccttcgctctctttttttatctttctccggtattcccggcgctattttttgccctgattggctacggcttccatcagcttgcggatctgttcgggatcgcccagaaagtaatctttcaccagacgtaacttgtcgtcgaattcgaagacgtatggcacggccgtcgggaggttgagttccgagatcgccgcgtcggagatgcctttcaggtgtttgatgataccccgcaggctgttgccgtgcgctaccaccaagatttcgtcgtgaacggacagttcggggaaaatcacgcattgccagtagggcagcgcccgttcgatggtttgcttgagcgattcggtgcggggcagctcctcgtccgggatcccggcgtagcggggatcgaagcgcggattgcggggatcgtcttcggccagcggatcgggtgcgacgtcgtagctgcgccgccagatgtgcacctgctcttcgccgaagcgggccgccgtttcgctcttgttgagcccttgcagtacgccgtaatgtttctcgttgaggcgccagtttttctcgacggggatccattcctgatcgagccggtcgagaacacagttcagggtccggacggcccttttcaggtaggaggtgtaggctttgccgaaacggaatccttcggctttgagcaattctccggctttgagggcctcttcgacgcctttgtccgtgagatcgacgtccgtccatcccgtgaagcggttttcgcggttccacgcgctttcgccgtgccgcaacagtacgatttttttcatggtatgatctgtttttatttgtatttcacttcgttgaggcactctccgtgggagaatgcctgaatgttttcgagggtcgtgcgggcgatgttgtccagcgcctcgcgggtgaagaatccctggtgggaggtgaggatcacgttgttgaaggagagcaggcgtgccagcatgtcgtcgtccatgatccggtcggaggtgtcctgatagaagtaatccgcctcttcctcatagacatccagccccgccgctccgatctttttctccttgagtccttcgatcaggtcgctcgtgcggatcagctgcccgcgtcccgtgttgatgatgatgaccccgtctttcatttgaccgatggcttcggcgtcgatcatgtggagggttcggtccgtgaggggacagtgcagcgagatgatgtccgagcggcggtagagttcggtcagcggaacgtaggtcatacctgattcccgggcgaacgcctcgtcggggcaggggtcgtagccgaggacctccatcccgaaaccccgcaggatgcggatgagggcacgggcgatttttcccgtgccgacgatgccggccgttttgccgtgcatatcgaagccgaggaggccgtgcagggcgaaatttccgtcccgggtacgccagtaagcgcggtgtaccttccggttgagcgagagcatcagtgccacggcgtgttcggccacggcatagggcgaataggccggtacccggactaccgtgatgccgtgctcggcggcggctttcagatcgacgttgttgaaacccgcgcagcgcagggcgatcaaccgtacacccatgcgggccagctccccgacggttggggcatccgccgagtcattgacgaagatgcagaccgcatcggcgccttgtgccaggggtacgttgtcgatgttcaggtggctgcggtggtatttgatccgtatcccgtagtcggcgttgatccggtcgaacgattcgcggtcgtagggctgtgtcccgaaaaaaatggttttcatggcgtatatttcatttaattataacgtttttgtcgaggcggtattatccgttccgttcacggattgtgccaagagcgggagatttgccgcacaaaccgtatcgaaagcaatatgtccttcgttcggttcggatttcgaagcactctgtctcatggcactttttttgtcccgtttgtttcctgaataaacatgcaatgaggaatccgagagaacgcatacgcaacagtcgagggtataaatggtggattttgagcctcgtgatgctcgggactttcatggccgtgatggacgtgacggtcgtgaacgtcggcctgccgaccattatgtcggtgtttcacatccccatttcgaccgccgaatgggtcattacggcctatatgattaccatgacgctcatgctgccttcggcgggttggatcgccgaccgtatcggcaacaagcggatgtatattctggggttggcgctcttcaccttcggatcgtggctctgcggccgtgccgggagcgatatgttcctgatttcggcccgtgccctgcaaggcttcggcagcggcatcatccagtcgctcggcctggcgatcgtcacccgggagtttcctccgcaacagcggggactggccctgggattgtggtcggtggcggccgccgcttcgatctcgttcggtcccttgatcggcggttatctggtggacgattacagctggcacctgatctttgatgtcaatgttcccgtaggactggcggccattctgtttgcaatttttatccagaaggagtggcgcggttcccgtgcgggcagtttcgactggctgggtttcctgtgcgtggtctgtttcatgccccttttgatcttcgcactggcccgaggcaattcgccttcgaatcccgaggggtggagttcgccggaggtgatcggatgttttgcggttgcggctgcggcactcattgtctttatcgtccgggagctgcggtgcgaaaatccgctgttgaatctgaaactgctcggcgaacgtaatttcggcgtttcgatggctgtgctggcgatcttcggtatcggcatgctgggcggtacctacctgctgccgctttacatgcagaaggggctgggctatacggcgatcatggccggcagcgttttcctgcccgtcggcctgatccaggacgtgctttcgacctgctcgggattcctgacccgctatatcaagccgcttttcatcgccgtgaccggcatcctggtcatgacgttgagtttctatttcgccagccggtttactcttcatactacgcatgcacaaatcatgttggtactctatctgcgcggtttcggcatgggactgacctttgccccgctgaacgatttctcgctcatgaatttgagccagcgcgatatggcttcggcagccggtatctccaacagcatcaagcaactctcgggcagcgtcagcatcgccctgcttaccgttattctgaccggccgtacggcgttccattcggcgcagggcggactctcttcggcggaaagctacgtggccggtatctccgacgatttccttttcgtcacattcgtttcgttggcctcggcactgcccttcctgtggctgttgcgcccgcgccgcaaggcggcttcgtttaagagcgaaggaacgggcacctgacgggtttgcttttatcgccttgaatccctatttttgtccgggggaatcgtcttttcccggaggattttgaaaaacgatcagcagacatacgttcccgatcccgaggtcgcttcgcggctcctggagtggtacggccgcgaggggcgcgaccttccctggcgtcgcacacgggacccttaccggatctggatttcggaagtgatcctgcaacagacccgcgtggcgcagggtatgtcctattatcatcgcttcctcgaactgttccccgacgtcgtggctctcgcttcggctcccgaagatctggttctcaagtgctggcagggactcggctactactcccgcgcccggaacctgctggccgcagcccggcggatcgtggagatgcacggcggcgttttcccgacggattatgccgacgtgcgggcattgcccggcgtgggcgactatacggctgcggcgatctgttcgatcgcctacgacgaaccctgtgccgcactcgacggcaatgtctttcgggtgctttcccgcctttacgacctcgatacgcccatcgatacgacttccggaaggcggacgttcgctgcgttggccgattcgctgatcgaccggcagcggccgggactttacaaccaggccattatggatttcggggctctttgctgtcttccggtacagccccgctgtacggagtgccctttgcgcgaccgttgtctggcttttgccgcccgtacggtcgatgtccgtcccgtcaaacaggggcgtacggctgtcgaaccccgctatttcaactacctgcacgtcgaatgcggcgatgaattggtgttgcgccgacggggtgccggcgacatttggcaggggttgtacgaatttccgctcatcgaaactcccgaacctgtggaatatacggtgttggccgcgatgccggagttttgcgctctcttcaaagataccgggacggtatgccttgttgggaccgtcacgatgcccgtgcatcaactttcgcaccgggcgatccacgctgttttctaccggatcgtcgtggagcgctggacgccctccttgcgcgaaatgctcgttattccgcgtgaaatcctcggcgattacgccgtttcccgtcttacggagcgttatttatcccgttaattcttcgtctggactctttgcggcacacggtttgccgtttgatcgacgtgaaacctaacgaagaaaacgagataaattatgtttacaggtgtacaattcacgcacttcattcaggcgaatccggcgctggccgtctttctgaccgttgcgctggggtttttgctgggtaagctgcgcatccgcagcttttcgctcggaacggtgaccagcgtgctgctggtgggcgtagtcgtcgggcagcttcgtatcgagattcccgaaccggccaaaacccttttcttcctgatgttcctcttcgccgtgggatatgcggtcggcccgcagttcttccgggggttgaagaaggacggattgccgcaggtggccttcgccgtggtggtctgtttgctgtgtttggggtcggtatggctcttctcctggctgatgggctatacgctttcgcaggctgcggggctgctggccgggtcgcagacgatgtcggccgtgctgggcgtggcgaccgatacgatccgcgaactgccgggcggagcggaaaccgatctcagttcaatgcccgtttgttatgcggtaacttacatcttcggtacggcgggttccgcatgggtgttgagttcgatcggaccccggctgctgggcggcgtggcgaaggtgaagcagtctgcgcgcgatctggagcagaagatgggcgaagacgtcagcctgaaagccggcttcgacccggcggcccgggagatcgttttccgggttttcagcgccgataacgaatggttcgagggcgggcgtaccgtccacgaattcgaaaccgtcatgcagcgcgacggaaagcgtattttcgtcgaacggctctgccagcaggggaaggtcgtcgatgaggtgacaccccggacagtgatccgtccgggcgatcaactggtcgtcagcggtcgccgcgaatacgtcatcagcgaagagaagtggatcggtgccgaagtgtccgatacgacactgacgaattttgccgttcaggtccttcctgtcgtggtcaatcgcaagggggctgccggggagaggatcggaaaggtcttgtcggctaaattcatgcacggggtcaatatccggtccatcgtgcgggcgggtgtgaagatccccgtgcggagcggagccaaactcgatgccggcgaccggatcgaattggtcgggctgccgcaggacgtgcgacgtgccgccgcacagttgggtttcagcgatccggtgaagaccgagagcagcgttccgttgctggggctgggtatctgtctgggcggtctgatcttcggatggatgctggtggccaagataggggcgattcccctgagtctgaccgtgagcggcggcgtgctgctcgcaggtcttttctgcggctgggcccgttcgcggcgcccgactttgggaggcattcccgaacagaccgtgtggttcatgaacaatatgggactgaatactttcattgcgatcgtcggcatttcgaccggaccgtcgttcgtcgccggttttcagcaggtgggctggagccttttcctggtgggggccggtgccacgaccctgcctttggtgctgggcgtattgatcggccgttacctgttccgtttcaacgatgccctgacgctcggatgcgtcgccggagcgcgaacgactacggcggctctcggcgctgtcgaggatacgatcggcagcaatgtcccctcgctgggatataccatcacttatgccatcggtaatacgctgctcatcatctggggcgtggtgctcgtgttgctgttggcctgacggagccggtcgatgattcgggcgggtctatggttttccatagatccgctttttcgtggtgtgaatcgctaaaagcggatgaatccggcggatttttgaaaaaaaattgattacttagcattctcttttaacgattgcgacgatgagtgcgaaactggcgaagtacgaccggttgtacgagcagatcaagggctatgtacagacgaccgacgacatttgggcacggctggccacgatggaggccgtgttgcatcataagatgcagacttttttctggacaggggtgtatgcccttatcgacgacgaactgattgtccgctcgtaccaggggcccgttgcctgtcagaagctgcggcatcatacgggagtttgctgggcggcggtcagcacgggagaaaccgtgatcgtgcccgatgtggagcggtttccgggacatatcgcctgtaattcgaaatcccgcagcgagatcgtcctgccgattcgggaccgggaagggcgtgtgttcgcctgtctggatgtggacagcgaccggttggatgcgttcgaccgggaggatgaagaggggctgaaaaagattctctcccttctttttgattaggcggcgatcctgcgtgggcggcgtatcgtatcttcatcacccgcgaaatccggtgcgtctttcagcgattgtcgtataaaataaattccgctgacgcggatgtccgagcagattcggcgctgcgtcggctcgattatttttgtaccggacaggaggcggttcggcgatctttacgtacgaatccgtacgattattcgcctctttctgatccttgcacaaaaaaatcccgctgtattttacagcgggattttttttgtatttggcatttagcggattaccgttacgcggttctcctgctcggtcttgaacggagacttggtgtcgctgtaacccttgtactgcaggttctcggcttttacgcctttcgagatcaggtagtcgtaaaccttcttcgcacgctgctcggccaggcgggtattcacggccttcgaaccggtttggggatcggcatggccttcgatcacgtaaatcttgtttttcggcgcattcttgatttgggtagcgatgatgtccaggcggagtttctctttcggactcagctcggtctggccgatgttgaagaaggtgatgcctttgccggtcagatagatgtcatcggtgtaggcattgccgtcgagctggtcggccgggataggattgggaccccacttcgccatttcggcagctttcttcgcggcggcagcttcggcagcggcttttttcgcagctttgtttgctgcagccaggtcattggccagttcggcgttgtcggcctgtacagcagccagagccaggtcgcggtcggctatgacagcctggtaagccattacatcttcgacggtgtagggcgaagcctgtttgaagccgcggcggttgaaacggtacgtaagaccgatcgtggcactgtaggctgcggctactttctgtgttcccgaattcaggattgagggcatgttgctgctgggcagcatccaagccttgagttccagttcgatgtccagggccgggcatacgcggaacttgttcagcaaaccggccgtgaaagcgaacgagtggtccgtcccgtagccccagtcgcgctggaatttgtcggtgaaacccgatacgtggtaaccgaagccggcgaagggcactgcgtaatagacgcggtcgtcacgctcgccgccgatccagttcgacagattcaccatgaagtccatgtgcgtgaagatgtacgggtctttcatgtattggttgccgaatgccgtgtcgttctggtactggccgccctgaatttgcaggcgggcacccattacggggtggaaccatttggtcagcgagaagtcggcctgccagttgatgtggttgaagcgcgacgatccgaaatcgtcttttcccagcgtgccgttgaagaccataatttgggcgcctccggcgacggtgatttcccagttgtcgaagaaacggttggtttcgtaaccggcccagcctcgtctcttgggctgttgctcttctacgacgatttcttctgcgacagcgacaacctgggctgaagcggctgcggcacaaagaacgagtgccatcgtaatgaataattttttcatgtagttcgaatttaatgtgtaataattttttgttttcgtgtatgtaaacccttacacgggagcttgattcatctctatatatccttttgtagaagctaaaagcaaagtccgggccaaaagcccggacctcgtttgacgttttgtatattttattgtctgtcggcagagaatcaaccgcatttcgagtacccgcaggacatgcacgtaagacacccgttctgataggccatcgtctcctggccgcagctcgggcacttgtccttggttttggtgccgtccgagatatattgcttcagtgctcgttccacacccagcttccaggtattgatggtttcgctgttcaggtggagcgattcgatgagcgatacgacgttggtgatcggcatgccgtggcgcaggacgcccgaaatcagcttggcgtagttccagaactcttcgttgaacaggcgcgaaatgccgccgatggtgttggtgtagccgtatcggtcgatatactggaagtcgtaccgtttcgaaccgttctcctcgcgtacctttataataaagcccttgttgattttgggcggaatatacatggcgtcctcttcgattttacccgtgaagatttcgtaagggcgtccatcctgcaggccgacgaaggcgatccagttttcgttgccgtttttgaaacgcacgatgtccgccgggatcgatttggggcgtttgagaatggtctgcccgttctcctcttttgccgcttttttcttcttatcgatcagtacgccttcgcggcagccgtcgcggtaaaccgttacccctttgcagccgcactcccaggccgtgcgatatacgtccgctacgagtgcttcggaaacgtcgttcggcagattgaccgtcaccgaaatcgagtgatcgacccacttctgaatttcgccctgcatcttgactttggccacccagtcgatgtcgttggccgtcgcgccgtgatagggcgatgcggctacccaccggttgagctcatcgtccgatatgtcttgcagtttcgaggtatcgtatccgttggcttcgagccatttgacgaagttgtggtgatagacgttgtactcttcgaacttttcgcccatatcgtccacgaaagccactttggcatcctggtccgaagggttgatcttgcggcgacgcttatagacgggacggaaaaccggttcgatgcccgacgtggtttgcgacatgagcgaggtggttcccgtaggggcgatggtcagcatggcgatattgcgtcgtccgtgttttaccatttcggcgtagagctccggatcggcctcccggatgcggccgatcatcgggttcttctcctccttgcgtgcatcgaaaatttcgaacgctccgcgctctgcggccatctttaccgaggcgcggtaggcttccagtgcgagggtcttctgtaccttcacggcgaaagccgtcgcttcgggcgtaccgtaacggagtcccaatgctgcgagcatgtcgccttcggccgtgatgcccagtcccgtacgacgtcctttgcgggccatcgtgcggatctttttccagagttcgagttccacgcggcgaatgtcttcgtcttcgggatcggcggcgatcttattgatgatcaactcgattttttccaattccaagtcgatgatgtcgtccatcatacgcatcgccttctcgacgtgttgcttgaatttctcgaagttgaacgacgcttctttggtgaaaggtttgtccacgtaactcaacaggttgatcgccagcaggcggcacgagtcgtaggggcagagcggaatttcgccgcaggggttggtcgccacggtcgtaaatccttcgtcggcatagcagtcgggaatactctcgcggatgatcgtgtcccagaacattacgcccggttcggccgatttccaggcgttgtggatgatcttgtcccaaagtttcttggcgtcgatatcctgctggtagagcggtttgtccgagtgaatcgggaactgttggtggtatttcttcccggcgagtgccgcacgcatgaattcgtcgtcgattttgaccgaaacattggcgccggtcaccttgctcgtatcgactttggcatcgatgaaacgctctgcgtcgggatgtttgatcgaaagggtgagcatcagagctccccggcgaccgtcctgggccacttcgcgcgtcgagttcgagtaacgctccatgaaggggacgataccggtcgaggtgagcgccgagttgagcaccggactacctgtggggcggatgtgcgaaaggtcgtgccccacgccgccgcgccgcttcatcagttgcacctgctcctcgtccatgcggaagatgccgccgtaggagtctgccggattcttgtggccgatgacgaagcagttcgaaagcgaagccgcttggaagttgttgccgataccggtcatgggaccgccttgcgggatgatgtagcggaagtggtcgagcagttcgaacacctcctgccggttcataggattggggtacttcttttcgatccgttcgatctcggcggcgatgcgctcgtgcatatcgcgcggagttttttcgtaaatatggccgtacgaatctttcagggcatatttgcttacccaaaccgtagcggccaggtcgtctccgtcgaaatattttttcgacgcttcgaccgcttcgttgtaggacacttcggtcgggaggcccggttgtttgttgcttgacatgatatcttgagttttatttctttatgtctttacaggaatcgggaccgatgcaggcttgttccgttcggtcccaactatacaaatttcctgcttttcttcgggattttcgaatcttcccgcgacaaattattccaaagttatcaacaatggataaaacgtgcgtcccagtgatccgggacgcacattttggaaaatggcggagtcgtcagtcctcgtttttcgcccggcaagccggtttgcccgtcgtgcatctatacggcgaagtgttgagcttactacctctgtaacatgattatataactttgttgcccctgtgtttgatgctccctgtcgggagttctttcccgctctgcggtccggtttccctccgaccggatagaaaacggcgcgtcggattcgcgcatatgcacgccgatcgcaggcggttgcggacaagcccggaaaacaacgcggaatctcgcgtcgttcgagtatatataatcgtttttatgggcggcgaagcgcggtccttccgtccgtgtttccgctgaccggacgcgttttacttgacggcgaccgcatcgatctcgaccttcgcacccatcggcagcttggatacctgatagcagatgcgtgcgggcatatccttcgtaaagaacgtggcgtaaacggcgttcatcgcggcgaaatcggcgatgtcggtgagcaggaccgtcgttttcacgatatcggcgtgggaataacccgcctcttcgaggatgtgccccagattggtgagcgactggcgcgtctggtcttcgatgctttcgggcatcgcgccggtggcgccgtcgatcgggagctgtcccgaaatgtagagcgtgtcgccgcactttactgcctgcgaataggggcccaccgctttgggggctttgggagatgcgataatggttttcatagtgtcgtattattttgattcgttaaaatttatggttgaattttctttttcgttgtacccggttctcgtttgatcggaaatagggtgcgtgctttttcggtcgcagggtatgtcggcaaccccgtttttcgccccgtttcgcatgaatgttcgattttaagttctattttcctgcgaccgggccgtttttatcttcgggaaccgtggcggagtacaaagttacgattattttggttatgtttgcacatattttgctggataaagattcaaaatcgatagcttatgacacgttttatgaaactggcggcactcgccgccctcgtgatgctcgtagcctcctgttgtccctgccgtaaacatcggaaaggcgacggcaaaccttttgtcggcaccgaatggcagcttgtgcagctcaacggtcgtgccgtaccggtggaaggcgacctctttaccgtcgttttcggtgaggacggacgtctttcggggctcggagcctgcaaccggtttatgggttcctaccaaaccacggaaacaggcggtctgaccgtcggtcagaacatggcttcgacccggatgttctgccccgatttggatcgggagcaggctttcggcgacgttttgtcgggagcgactcattatgaagtggacggcgatatgctgatgcttcttaccgacggcgaactgcgggctgttttgcaggccagatagccggattgcgcggattttgcggcggaggaacctttcggggttcctccgccggtatttacagggagttgtatttcctcttttgtccgttgtttcgatcatcgggtttttcgttccgtttttattattctattgtgtgaaatttctgttacagagaaataatgcgtcttatattttgttatatttgtaacaatataggatgcgttcgggcgtcgttgaggtagattcggcccggcgttcgcttttcactcgttgccacatggccggactttatttccatatccctttttgccgcaggatttgcgcctattgcgactttttcaaaagcgccgaggtgggacgtgtcgattccgtactggaggcgatggagcgcgaattggacggagccgtcgattggctctccgaccgtcggatccgtactgtctatttcggcggcggaaccccgtcgctctgcgatcccgcccggttgcagggattggcggaccgggcggcggcgctgctggattgcagcggtgtggaggagtttaccgtcgaggccaatcccgacgatatgaccggagagtggctggaggcgctggcccgtacgggtgcgaaccggttgagcgtgggcgtgcagtctttcgacgatgacgagttgcggctgatgaaccggcgtcatacggggatgcaggccgtcgaagctgtccgccgggcgcaggctgcgggttttgcgaatctgacgatcgacctgatctttggcgtgccgggtttcggcggcgaagtactgcgccgtaacctcgaccgggctttggcgctcggtgtacagcatatttcggcataccatttgacgatagagaaaaatacggccttcgggcgtcgcctggagcgcgggcggttctccgaggtggacgaacaggtgagcgaacgcgaatacctggaggtgcaccgaacgctgaccggggctggattcgagcattacgaagtgtcgaattatgcgctgcccggctgccgggcccgtcacaatgccgcctactggtcgggcgacgagtatttgggcatcgggcctgcagcccactccttcaatgggaagtcgcgccgctgggccgctgcgtcgatcgacggttacctgcccggtgccggaacggaggcgatttacgaacaggagcggcttacggagcgggatcgctacaatgagtatctgatgacccgcctgcgcacggccgagggactcgagctggctgcggtcgaaactcgtttcggaaaagagcgggcagagcggctgctgcggcaggcggagcctttcatggggatcggagagctgtgtttcgcggccggccgactggcgattccggcggagaagttcctggtgtcggatgccgtgatcggcgcgttgttcgaagcggacgactgattgttgaataatcaaatcattgaaatatgaacgatatgaaactgaaacccgactttctcttcgagatcagttgggaagtgtgcaataaggtgggtggtatcaataccgtgatagcgaccaaggcccggaccgtgtgcgtaaagtacggcgaccgctattttacgatcggtcccgatctggggcagggggctgaccgggagttcgaggaggatccggcgctgctcaaggggtggcggcagaccctgtatgagaaggggatccgtgtccgtgtaggacattggcgcatcgtcgggcggccgcaggtgattttggtcgatttttcctcgctgattccccgcaaggacgacatcttgaagttcctttgggagagctaccgtgtggattcgatttcgggccagtgggattacatcgagccggtgttgttcggctatgccgccggactggtcgtagcttcctacgtcgaaactttctgtaagtccgcaaaccgggtcgcggctcatttccacgagtggatgaccgccgccggaggactttatctgcgtcgggagtcgccttacgtggccacgttgttcactacgcacgctaccgtgctgggacgcagcatcgccggaaacggaatgccgctttatagggatctgactacgtacaatgcggacgacctggcccgtcgtttcggcgtgacggccaagcattcgatcgagaagaaggcggcggccaacagcgacgctttcctgaccgtgagcggaattacggctaccgaatgtcgctatttgctggggcacgaggtagatgtcgtgacgcccaacggttttgaggacgatttcgtttggcaggacgacgactatcggatcaaacgtgaagaggctcgtgcggctctgatcgctgtggcggaggcttgcctgggccgcaagttgcaggataatccgctgatcgtcggcacgagcggccgatacgaattccgcaataaggggctggatgtgctgctggagggtatgaagcggctggccgggctggaacgcctggatcgggaggtcgtgttgtatgtcatggtgcctgccgccaaccggggagcccgtgccgacttgcagaagcacctgcaggatccatcgcagccgatcgacggctcgcaatggccttgggcgacccattatctggagaatatgcagtgggatccgatcgtgcgggcgatcgacggcagtccgctggccgatcctgcatccaaagtgcatgtgattttcgtgccttcgtatttggatgaccgggacggtattttcgacaagagctattacgagttgctcgtgggcatggatctgaccctgtttccgtcgtattatgaaccctggggctatacaccgctcgagtcgatcgccttttccgtgccgaccgtcaccacgaccctcgccggattcggtctttggatcgaccggcgggaggagcatcccggcgtagcggtactttgccgcgaggatggcaacgacgacgaagtggcctctgcgctggccgatgccgtgctgcggttttcgcagttggatgccgctcgtgtggaggagatgcgtcgtgctgcgggcgtgctgtcgaaagaggcgctctggagccggcttttcgaggcgtacgaagaggcttacgcgctggcgctcgataatgccgacgtgcggatgaaccatgtggcttcgaatgcgacgccgctgcccgagcagcaggtcaagctcgtgcatcaggcgcttcgtccggagcgtccggagtggaaccggatgatggtggagaagaaccttcccgaacggctccgtccgctcgaggagctggcccacaacctttggtggtgctggaatcccggcgcccgggatctgttcgaggagatcgatcccgacctttggaaccgaagcgaacgtaatccgatcgcttttctcgatctgctgaccataaaccggctgaaagagttggagcgggacgagtcgttcctggcttcgcttgatgcggtatatgcgcagttcaagagctacatgtccgaaaaacccgatccggcgacaccgaagatcgcctatttctcgatggaatacggcttgcatgcttcgctgaagatctattcgggcggtttgggcatcctggccggcgactatctgaaggaggcgtccgacaagaacgtgccgatggtcgcggtcggattgctgtaccggtacggttattttactcaaaaactctccgctcagggggctcagcaggcgacttacgaagcacagaacttctcgaagctgccgatccagcccgtgcgcgatgcggtgggcaactgggcgaccgtgtcgattcccctgccgggacgtacgctcacggcccgcatctggctttgccgggtgggacgtaccgacttgtacctgctcgacgccgattacgaggccaatctcgaggaggatcgccgggtgacgcattacctgtacggcggcgattgggagaaccggctcaaacaggagattctgctgggtatcggcggtgtgcgggcgctccagtcgctgcatatcgcgcaagacgtttcccattgcaacgagggtcatgcggcatttctcgggctggagcgcatccgcaacctggtgatgcgccgccgactgactttcgccgaagcgctggaagtggtccgctcctcctcgctgtttacgacccatacgcccgtgccggcgggacacgatgcgttccctgaggcgatgatccggcagtatttgtcgcactatcccgaggagttgggcatcgactgggcgcagtttgtcggcttgggtcgcgtgaatccggaggatccgaacgaaaaattctcgatgtcggtgcttgcctgcaacctttcgcaggaggtcaatggggtgtcgtggctgcacggcgaggtttccaaagaaattttggggaatttatggccgggctacttcaaaaacgagctgcatatcggttacgtgaccaacggcgtgcatttcccgacctggacggctacgcgcctgcgccgtctgtatgcccgctattttcccgaagggttcgaggggcacgaatatcgtatttcggagtggaagaaggtgtacgacatcccggacgaagacctttggcaggagcgcatggtgctcaaagagaagctcgttcgcctgatccgccgccgctactgcgatcccgggcaggtgcgcatggattcgccccatcaggtcatgcaggtgctcgagagcatcaagcccgatgtgctgaagatcggttttgcgcgccgtttcgccacttacaaacgggcgttgctgctcttcaccgatctggatcgcctggcggccatcgtcaacaacaaggagcgtcccgtgcagtttatctttgcgggcaaggcgcatcccaacgatcagccgggacaggatctcatcaagcggatcatcgaagtcgcagccatgccgcagttctccggcaagatcatcttcctgcagaattacgacatggagctggcgcgtcgcctggtgcagagcgtggacgtgtggctcaatacccctactcgtccgctcgaggcgtcgggtacgtcgggtgaaaagtgcgtgatgaacggcgtgctgcagttttcggtgctcgacggctggtgggtcgagggatataaggagggtgccggttgggcactgccgatggagacggtcttttccgatccgcagtatcagaacgaactcgacgccgagatgatttacaatacgatcgaagaggagatcgtgccgaaatactacgaccgggatgccgacggtattccccgtgcgtggatggcttcggtgaaaaaatgtattgccgaaatcgcttcgaacttcacgaccaaccggatgctgcgcgactacgaggtgcgtttctacaaccggctggcagcccgcaagcgggaactgtcggagaacgacttcgccgttgcgcgcgagatcgtcgcctggaagcacaaggtgctggctgcgtggcctgccgtgaagatcgtggacgtgcagcgtgcccgggtcggcgacaagccgatcttcataggacgcagttaccatttcgagcttacgctcgacctggccggactcgctccggaggacgtgggggccgaactggtcgtggcccgtcccgtggagccggaccgggtcgtggaggtcatccgtaccgtgccgctcagccaggtgcaggtttcgggcagccaggtgactttcgccttggactatgttcccgaacaggccgggatgttcgatatggcgctgcgcattttcccgcagaatccgatgttgccgcatcgtatggatttcgcattggtgaagtgggcatgaaatgattgttgaaaaaaaggtcgttttctgataatttttgatttttcgcacggtttggacttgatggtctgcgaaaaaaagagtatctttcagaaaagatcgttcaagcggaccggaactttttctgatccggtcggcggagaaaacgaaataaacgattcgacgggtccggcaggagtacgggctgattttgccgttccgctctgtcggaaatgaacataaagaacaaacagttatgtcggtacttacatttgataagaaggaactgggaaatctggagtattcgttgcagcgcgaaatgctggctacggatcgcagaggcggctatatgagcacgaccatcgtttgctgcaacacgcgcaagtatcatggcctgatggtggcacccatcgacgacagcgaccgcgcttacgtgctgctctcgtcggtggatgaaaccgtcgtgcacgacgggcaatccttcaacctggcgctgcaccgtttcccgggaacctatgaacctcgggggcataagtacatcaccgatttcgaatatacgccgacaccgacgatcacctaccgcgtgggaagcatcgtgttgcggaaagagctgctctggatacacaaccgcacgcagttgatgatccgctatacgctgctggaggcgccgtccgatgtccggcttaggctccggcctttcttcgccttccgggacaaacatgcgctcacgcatgccaatatggaggccgacggacgttcccggccgattccgggcggggtgaagtgtcggttgtattccgattttccctggctgtacctgcaaaccgattgtcgggatgcggagttcgtgccggctcccgactggtactataatttcgaatacgccagagagatcgagcgaggatacgagggagatgaggatctgcttacgacgggttatttcgaactcagtctcggtcggcggcaaagcgtgattttctctgcgtccgtcgaagccattcccgatcctgcggccatcggcggaatgtttgcggaggctctgagcgcccgcagccgcaaggtcgattttctgagctgcctgcgccactctgcccggcagttcgtcgtccgccgccgggacgggcgggccgaggtgctggccgggtatccctggtatgggcagatcggacgtcagacgctcgtagcgctgcccggcatcgcgctggagcagggacgcacggaggattgcctggatgtgctcgatacggtcgtgcgcggacgccgggacggtatgtttacgggttctttctcggctgccgaggctgcggatgctccgctttggtttttctgggtgcttcagcagttgcagcggacgctgggtgaggaggagatatggaagcgctacggtatcgtgatgaaagagctgctggcggcttatcgccggggcgtcggcggcgtggccgtgcacgataacggtttggtgtgggcctcggcgcccgacaaagccctcacctggatgaatgcgctggcgggtggtgtccccgtcgtgtcgcgggacgggtatccggtcgaaatcaacgcactttggtacaacgccgtgtgttatgcccttgagctggcttcccgtttcggcgaggaggagttcgtcggcgagtggaaagcgtggcccgagcggattcggaacgcttttcgggagatgttctggagcggcgacgacgggtatctggccgatttcgtaggtcctgaagggccgaatcggtggattcgtccgaatatggtggtggcgtgcggtttggattacaagatgctcgatgaggagcagcaggcttcggtgcttcggatcgtggggcagcatttgctgacacccaaagggctgcgttcgctttcgccccgcaatcctcgctataagaaccgctgcgagggcgatgaagccgttcgtgcggaggcttcgatgaacggctccgtatgggtttggccgctttggttttatgtcaaggcttcgttcgacctcggtggccgtgagtttctgcctcgggcggaggagctgctcgcccgtttcggcgaggagattcagagttacggtatcggatcgatcaacgagctattcgacggcgatcctccgcatgcgccttggggcgccgtgtcgcaggcgtggagtgtcggggcggtgttgatgatccgtgaaacgaccgaacgctggcgtcgtcgccggggacacgggttgttgccgggtcttcggaaaaagcgctaaaggatgcgaaggaaaagaacttgccgccgcgtaaggtgtccgaaattttttctgtcggcccgggcaggccggggtggaggttgccgggaggggcgaccggtgtttcgcgaagtcgaataagttacgaaatgaaacgtgattatatactttgagtgtaccttttcgggggcgcagtgtcccaaattccctccgagaagcggatttaggggaagggtgcatggcggacacggtttcgggccgcgaataagcactccttggattcgatgctgcgaccgtcggataagggtacatggaaagatataattgttagaataaaaaaatagaatacaaatgagagtgttgatgttcggttgggagtttcctccccatatcgccggcgggctgggtacggcctgctacggtatgacgcgcggtcttgcacgcaacggtgtggaggtcgttttcgtcatgccgcgtgcctatggcgacgaggaccagcgcttcgtccgcgtggtgaatgcgagcgacgtggaaacgatcggtacgcgcgatcatgagttttccgaagagctgctcgagaaggtttcgttcatccacatcgattcgaacatgttgccctacatctctccggaggagtatgccgcctaccacgacgagttcgttcgcagcggccggacacacgagtggaccgacgtatggaaacagcgctacaccttctccggaaaatacggcgccaacctgatggaggaggtcgcccggtatgcaatggtggcggcgcaggtggccaaagacctcgaagggcagttcgacgtgatccatgcccacgactggctgacctatttcgccggaattgcggccaagcgggtttcgggtaagccgctggtggtgcacatgcacgccacggagttcgaccgcagcggcgagaatatcaaccgtcgggtctatgccatcgaaaaggcgggtatgcaggctgccgaccgggtgatcgcggtgtcggagctgacgcgtcgcatcgtcatcggcaagtacggcattctggccgataaggtcgtgacggtgcataacgccgtgcgtttcggcgagtcggaggaggctgcgccggagcgggcggtcaaggataaggtcgtcaccttcctgggacgcatcacctaccagaaaggtcccgattatttcgtcgaggctgcggccaaggtgctgcaacgggtttcggatgtgcgtttcgtcatggccggctcgggcgatctgatgaaccatgtggtgcggcgcgtggcccagttggggatcgccgaccgcttccatttcacggggttcctcaagggcggggaggtgcagcggatgttccgtctgtcggatgtctatgtcatgccttcggtgtcggagccgttcggtatttcgccgctcgaggccatgcgttcgggcgttcccgtgattatctcgcggcaaagcggtgtggcggaggtgctggattacgccattaaagtgaattactgggacgtggatgctctggccgatgccatttacgggcttcttacttatccggctctgggtaggatgttcgcttcgaaagggctggaagaggtgaccggactcaaatggaccaatgccgcagcgaagatcaagacggtttacgaaactgtcgtcgcggaggcgaacaattaaaatatttgcggagtatgaaaacgatttgtttctattttcaggtacaccagccctggcggctgaagcgttaccgtttcttcgatatgggccgtgaccacaactacctggacgacctgaccaatcgctcgatcatgcagaaggtcgcgcgtgagtgctatctgccgatgaatgccttgctgttcaatctgatccggcagagcgaggggcgtttccgctgtaccttttcgctgacggggctggccgtcgaacagatgcgggcgtatgcgcccgaggtgctcgattcgttccgccgcctggcccggacgggctgcgtggagttcctggccgaaacttactcccattcgctggcttcgctttcgtcgaaggaggatttcatgcagcaggttgcgctccataccgaactgatgaaaaaggagttcggcgttgcgccgaccgcctttcgcaataccgaactgatctattccgaccggatcggctccgatgtggccgagatgggtttcaagaccatgttggccgagggagcccgacacgtactgggatggaagtcgcccggctatgtttatgccaatgcgctcgaccagcgcttgaggctgttgctgcgcaattacaagctctcggacgacatcgcgttccgtttctccaaccgagggtgggaccaatggcctctcacggcggaaaaatacacggggtggctcgcttcggacgagctggagggggatgtggtcaatctcttcatggattacgaaaccttcggcgagcaccagcgtgccgatacgggtattttcgactttatgaaggcgctcgttccggctgttctgaagcgggaggggttggagttcgctacggtgagcgaagccgctgcgaaataccagcccgtcgccgtactccattgtccgcacgtgatgtcttgggcggacgaggaacgtgacatcacggcgtggctgggcaacgaattgcagaacgaagctttcggaaaactgtatgccctgcgggataagatcgcccggctgaaggatcccgatttcgaccacgtgtggaacttcatgcaggcttcggatcatttctattatatggcgaccaagtggttgtcggacggggacgtacatgcctatttcaatccttacgaatcgtcctacgatgcctttatcaactatatgaacgtgctttcggatttcgagatcgaagtggagaaggcgttcgaccggaagccgccggtccgcaagaccaaaccgtcgccgaggaaaaagggttccgatcgggagaaagccggggtgcgataatctttcggtcgaaaaaggcggtgcgtcataacaggcaaactgcttcgttattatcggtgtcacggctcgatcatgtgcgtcggtacacactcttcgccgtgaacctcgatgccttgtattttacctgtttttacatacctgaaaagggatgcgccgaatttctcgatttgacacgtcccttttttattccgggatgcctcggtccgtcagctgcccttgcgcttgaaccgcgacgggctgtagcccgtgtgttgtttgaaatatttgccgaagaacgactgggtcgagaagttgaggtgataggcgatctcctggatgctcatgcccgaatagcgcagcaggctttttgcctcgaggatcaccgcttcgtcgatccaccgggcggcggttttgccgctcacgtccttggaaacggtcgaaaggtatttgggggtgatgttgaggcggcgggcatagaaccggacgttcctctcctgtttgctgtattgccggactaattccatgaactcttcgaagatcacctcgccgcgccccaacttgaccgtgtttttctgctcgcgcatgttcagctcggtgatgatgtagaagactgcggtgaacaggcagcggatgatctcctgtctgtaatgttccttgtcgctggcaagaatcgtcttgatgagttggaacacctgtcggatctcgtgcgtgtcctggggtgtcacccgcaggcagggctgtttgccgaaacgcatatagacgggcagcgaggccgaaaggtctatctggatctcgttgatgaacgatttggaacaggcgacgaaataggccgccgcatcgctggtgctggccaccgtgcggatcacgcggtcggggctgaagaagacgatcgtgtcgggcacgacttcgtactcttccgtatcgatcgctacgacggccgaaccgctggccatgatgatcgccgagaagccgtcgatcagggcggggtagttgcccagcgtatcgcggtggatgtcgaacgaagcgatcaccaggtcgtccgacaggtaataaacgtcccgcatctcctgcttgatgcgggagatcgaaactttttgcagggttatctcgtccgccaccatgccagtttgctgatcagattcttgaaataggcgaaccggccccggcggggtgcctccgacagcgggcagacgacgcggagctcgttgtgcagacattcgatgtgcagcgggaaatcggcccccttctgtccgtccacgtcggtaggttcgttgatcggcgaggtgatgtcgagcgtgcgggctcggaaatgttttacctgcgagggccgaccgcccagcaggtgacggagcatcgatacgaccgagaagagcatgttgcgcctttgcagcaacagacagtcgaacataccgtccttaatgctcgagcggggggcaaggtggaatcctccggccgtttctccgttgaatatcaaggccatgagcgattcgaggtcgaaggctttgccgtcggcgagaatttgcagcggaatgccgtgtaccgagcggaactccttcacgccctcgatcaggtaggccagcttgccgatctggtgcttgcgtttgtccggcgtgcgctgggacgtggtggtgaagatgccgaaactgaagatattaacgaaatagtggtcgttcacgcgtccgcaatcgacccgctcttccgtgccgccgaggagttgcgccgccgccttgaccgggtttttctccatgccgagcgctccggcgaagtcgttggccgtacctgccgggatgatgcccagcagcaggtcgaggtgcttctccttcatccgattgaccacgtaattgaccgtgccgtcgccgcccgccacgaccaccagatcgaccgtttcgtgtccattgaaagggttgcggctgaaatcgatcgggccgtctacgatcgagtagccggcctgccggaacatttcgccgatggcttgggaatctttttcgatttttccttttcccgactgggggttatagagaaatagaacttgtttcattcgtacgcaatgggattattctggaatcatcatttcttgcatcgccggcgagcagtaaatttcgtagccgtctttcccgtcgtcgaggataaaatagaccttcgcgtcgggaattttccgggagagggcgatggccttgttcgcgcccaggctcaaatacatggtcgccatggcgtcggcttcggcgcagttgtccgcgaccacggtggcggaaagcaatcgtgacgtgacgctgcggcccgttgtcgggtcgatcgtgtgggatatcttattgcctgcggcgtcgcggtagaagcggcggtagttgcccgaagtggccaggcctccttcgctcatgcggatacgtccggtgagataggcgccgtcggacatattgccgtcgaagggagtttctatgccgatccgccagggaatgcctttgctgctgacaccctggcagcggcattcgccgccgatctccaccagatagttcttcgcgccgcagcgctccatgagggccgcgaccagatcgaccgtatagcccttggcgatcgagttgaaatcgagctggacgcggggatcgtccttcacgagcctgccgtcccggatatggacacgccggtagcctacgaattgcaggagcgaatcgaggttcggggtgcgttccgcctcgtgtccggcgaatccccaggcatcgaccagcggcttgaccgtcacgtcgtagtggccttcgctcaagcggctgaaccgttcggccagacggaggttgtagatgatatgttcgtcgagcgaatcggtttctccccggttgatgcggctcagcagggaggtggagtcgaaaatcgacatcgaagccttggcttcggcgtcgatttgcataatggcccggtagagttcctgtgcggtgcagtccgtgatgtcgcccgttgcctggaaagtcgtacccagcatcgcgccgcttgccgtaaggtactctgcgcggcggtcgcagttcgctgcaaggaccagaacgataacggtgtagagcagcagggcgatctttttcatgttctatgtgtcttcttttttggcaaaaatagtgtttttcgctccggtttgcaaaaaaagagggctcttcagctaaaaaattgtattcgtttaagttggttattgtgaattaagttcgtacctttgcgccacgctctggcgttattcacggtaaggggaatgcgtcgtagagtggaactaaataaacttttgaaaatgggttatttatcagctgaaaaaaagcaggagcttttcggtaagtacggaaagtccaacaccgacacgggttctcccgagagccagatcgcgctgttctcgttccgtatcaaccaccttacggaacaccttcgtagcaacaaacacgacttcggtacacagcgtgcgttgctgcgtctggtcggcaagcgccgccagttgctggagtatttgaaagaggtcgatatcgagcgctaccgagcaatcatcaagacgctcaatctccgtaaatagtcccggaggcagaaaaatggggttggccaaagtttcttttggcagccccatttgtaatttggaacatacattttgacgtaaaaatatctatggaagaaaagaagttgtacaatgcagtccggaagacgatcacactggcagacggccgcgaaatcatgatcgaaacgggcaaactggccaagcaggccgacggctccgtcgtggtgaagatgggagatacgatgctcctgggaacggtggtagccgccaaggacgcgaaacccgacactgattttatgccgctccaggtggagtataaggagaaatatgccgcttgcggtcgctatcccggcggtttcatgaagcgtgagggcaaggctaacgacagcgagatcctcgtagcccgtctgatcgaccgtgcgctgcgtcccctgtttccgtcggactatcacgccgaggtatatgtgaccgtaaacctgatttcggcggacaaagatattcagcccgatgctctggccggactggccgcatcggctgcactggccgtttcggacatcccgttcggcggtccgatttcggaggtgcgtgtggcccgtatcggcggtcagtacgtcatcaacccggccttctcgcagatgcaggacgccgatctggacatcatggtcggcggtaccatcgacaatatcctgatggtcgagggcgagatgaaggaggtgtccgaggaggtgatgctcggagctatcaagttcgctcacgaagagatcaagaaacattgtgccgtacagatcgagctttcgaaggagctgggcaaggacgtgaaacggacctattgccacgaggtgaatgacgaagagctgcgtcagaccatcattcgggagctttacgacaaggcttacgccatcgccaccagcggtacgatgaagcatgagcgcgaagatgccttcaatgcgctggaggccgagttcgccgcccgtttctcggaagaggagctggtcgagaaggcaccgctgattcacaaatatttccacgacgacgtacagaagaaggccatgcgcaacatgatcctcgacgagggcaagcgcttggacggccgccgcacggacgaaatccgtcccatctggtgcgaggtgggctatctgcccgccgctcacggttcggcgatcttcacgcgcggtgaaacgcagtcgctgaccacggtgaccctcggtacgaagatggacgagaaggtcaaggacgaagtgctggtacagggtaccgagcagttcgtgttgcactataatttcccgcctttctcgacgggcgaggccaaagccgcccgcggcctgagccgtcgcgagatcggccatggccacctggcatggcgcgcgctgaagccgatggttccggtcggagaggagaatccttatgccgtgcgtgtggtgtcggatattctcgagtcgaacggctcgtcgtcgatggcgacggtttgtgccggtacgctggcgctgatggatgccggcgtgaaactcaagaaacccgtttcgggtatcgccatgggtctgatttcggattccgctaccggtcgttgggcggtgctttccgacatcctgggcgatgaggaccacctgggcgacatggacttcaaggtgacgggtaccaaggacggtatcacggctacccagatggatatcaaggtcgatggcctttcgtacgaggtgctggccaaggcgctggaacaggctcgcgtgggccgtatgcacattctgggtaagctgacggagtgtatcgccgagccgcgtgcggattaccgtccgttcgtgccgcgtatcgtacagatcaccatcccgcaggatatgatcggtgccgtgatcggtcccggcggcaaggtgatccaggatattcagaagacgacgggtacgactattaccatcaccgaaaccgacaacaagggcgtcgtggacatcttcgggctggacaaggaggcgatggatgcagccctgtctcgcatcaagagtatcgtggcgcagcccgaggtcggcgatgtatataacggcaaggtccgttcgatcatgccgttcggtgcgttcgtcgagatcatgccgggcaaggacgccctgctgcacatctcggagatcgactacaagcgtttcgaaacgatggaggagaccggcctgaaagagggggatatgatcgaggtgaaagtcatcggcatcgatcccaagaccaacaagctcaagctgtcgcaccgcgtgctgattccgcagcccgaaggctggacggagccggagcgccgtccccgcgagcgcggcgatcgcccgcgccgccgtcctgagcacaaggagtagaactctgcgggtccggatcgctgctacggagataatttcggttttgttcggaaattttggccggaatattgtacaatgtttgtagataatttttatatttgcattactccgtagcttttgtggggcagataaaacaggcataaatagaaaaagaaaggatttaacatttaatttttaaaagattagtttatgaaaaagctgatgaaattgagcttgctgctcgtggtcgttgctttgacgttttcgagctgtaattgcttcaagaagatggcaaagaacagcgatgatgtatcgctgacgtgtgcacctgaagtgctggtactgaataacggtgtggttgccgccgacattacggcacagttccccgtgaagtacttcaaccccaaagctatcgtgaaggttactccggtgatggtattcgagggcggagaagttgccggtactccgaaattcttccagggttcgaaagtgaaagagaattatacggtcgttgataagaagacgggcggtgtgttcaccatgcatgtcgagttcccctacgatgagcgtatgcagatttccgaactccagttgcgtgtcgaggctaaatgtccgggtagcgacgagtttacgctggttaatgccaatacgggcaaggtcgtgaaggccaaggagctcgaggctaaccccgcaatcgtacgcgagtgcggtctggtcgttgccgagggtgtgaataccctgcagcaggatctggcttacgccgatgcgatggcagctctgccgagcgactacaaacgcgtgactaccagcgtggacaagaccgagatcctctatgcgatcaacaaggctaacgtaaccaagaaagcgctgaaagacgccgatctggaggcattccaggcgaatgtggatgagaacctgaaaaacgaccgtgctacccagcatgttgccgtgaagggttatgcttctcccgacggtcccgtgaagttcaacgacacgctgtcgaaggagcgtagcgaatcgggcgacaaagttcttgcgaaactgctgaaaaattcgggtctggatatcgacgttgccgcttacggtgaggactgggaaggtttcaaggagctggtttcgaagtcgaacatcaaagacaaggatctgattctccaagttttgagcatgtactcctcttcgacgcagcgcgaggatgagatcaagaacatgtcttccgtattcaacgagctgaagaaagacattctgccgcagctccgtcgttcggtgatcgtgaacaccatcgatctggagggcaagaccgacgccgagatgatggcgcttgtcgaggctggcaagctggatcagctcaacctgaacgagctgctcttcgttgcggagtcgatcgcacaggacaacgctaccaagaacatcgtattggcttatgctgccgagaagtataacgacgcccgcgcttacaacaacctgggtatcgttcttacggaggaaggccgcacggctgatgctttgaaatgcttccagaaggccgctcagttgggcgaggcttccgaggcgctgaacaccaacctggctcttgccaacctggcgaacggcaatatggcagaggctcagaagtatgccaagggcgctgatgcaaaggcgaagagcctggtcaatgcagcacagggtaactacaacgacgctgccaagcagctcgacggtatgaatgccgctatcgctaacacgatgaacaaggactatgcggctgcaaagcgtgctatcgctaaggatatgagcgcagaggccgattacctgcgtgccgtgatcgcttcggaagagggcgatatgagaacggcagaggcacagttgaagagcgccgtgaagaaggatgagaagatggcgaagaaagccatgaaggatatccacttcaagaaactcttcgaagagggtctgaagttctaatccgttcggattcgatgaaaaatatccgcaccggaaacggtgcggatattttttgtctttccatgtaccccttgtccgacggttgaagcatcgaacccggggacgcttgttcgcagtccgtggctgcgtctgtaatgctgaccatccctgaatccttttaccgggaaggggatttggaaaactacgctcccaaaaagtatataattgcatttttttggagtttatactttcgtgtatcaagatcgtttttcttgtcgatttcggcggcggctcacagctttgcgggccgttattcaatgcttgcccctaccttgcgcctttccctttgggtggttttgaggaaggtcggtcggcatcggatcggtaattgtgatacataatcggattttgcgatgatagatcgctcgatcttacatgagcgatggtcgtcttttccgggttggtaaagttcgattgcctcctctcgaacaggattctgggaaggggcggttcgtaaatacggcttgcgacttaaagcgatggtcgtcggatttcggagcccgaaacggggagttcctgaagatgggatggacattttcagacgcggatcgtccgggtaggatcggatgcgcacgaaatttgcggtatattggaagaaatatgaaaaagatctaaattttttatatttttgtcgaaagcgaattggtgtcggctctatttgtttgtctttgcagcacttttgatcgtttgggaaacgggcctttctgggttgaaatgatattttacaacgggtaacggtcgtgttttttccgatggaaggttgcgttttgcacgaggcttgttatggattttatgtatgtggggacggttcgatattgactttttgttttgcgctttgaaggcgaaccgtctgtgtaaataataggaaagttatggaatacgcgaatcatttgaaagaatatgcgccggcaatgagcgaggctcaggtggccgaggaaatggatcgtatccgtaaagctgcggtacgaaaccatactccggaagtttacaagctctgttattcggcggtggatttaaccacgctgtcgtgtacggactccgtggagtcggttacggaatttgccggcaaagccgtcaagttttaccgacagtttcctcatcttcccaacgtggcgtcgatctgcatctatccgccgttcgtcgaaacggtcggtgtggtggtcgatggtacggatatgcgtatcacgagcgttgcgggcggatttccttcttcgcagacgtttctcgaggtgaaggttctcgaagtagctatggccgtcgagaacggagccgacgagatcgatatcgtcctgaacgtgggtaagatgttggaagggcattacgacgaagtcgctaacgaggtcgaggtgattcgtgccgagatgagtcccgaggtcgtgctaaaggtcattatcgagtccggagctttgaaaacccccgatctgatccgcaaggcttcgttgctttcgatgttcgccggggccgatttcgtcaagacttcgaccggcaagatcgacgtgtctgccacgcccgaagcggctgtggtgatgtgccaggcgatccgggattactatcggaaaacgggacgtaaggtgggcttcaagccggccggcggtgtccggagtgccgaagatgctgcattgtattatacgatcgtcgaggagattctgggtaaggagtggcttacgcccgaattgttccgtatcggagcttcgtcggcggccaataatctgcttacggctatcgaaggccgggaagtcaagtttttctgatccgaatgggcggatgaattaaaaaatagcggcaccaagaagtgccgctatttttcttgggaaaggttggggtaattaccgcatcggtacctcgatcagaagcaggctggctttcccgtccgtatggagggtgatgtcgttctgctcccaaatgcccatgccgtcccgggaggccagcttttcgttctcgaccgttacgtcgccttcgaggacgaagacgtaaagaccgtttccttcccggcgcatggcgtattcataggtatctttctccaggttcagggtgtggaaccaggccgactgatgaatccaagccgtatgctcggaaccattgccttcgggagccacgatcgtgcgcagctcattggtgcgtgccggagcgagcgtgatctcctcgtaacgggtcggaagtccgcgtcgatccgggaatacccatatctggaggaatttgacgggacggtcggggctgttgttgaattcgctgtggatgattcccgttccggccgtcattacctggatttccccggtgcgcagcaccgaagtatgtcccatgctgtcctgatgtcgtagttcgccctcgagcgggatggaaacgatctccatgttgtcgtggggatgtgcgccgaaaccctctcctccggctacggtatcgtcgttgagtacgcgcaatgcgccgaaatggatgcgctcgggatcgtggtagtcagcaaaactgaacgtatggtagctgtcgagccaaccgtggtcggaatgacctcgtgtgccggctctgtggattacttttttcataatataatggattgattataagaaggtgttgcaaatagtgttccacgataccgcttgtagggcagggctgtccgaatataggttgccgaaggagtgatcgtgcggtcgagcgacaaagagaacggtccgggcgttagccccggaccgttctctttgtgaaaatagcttgtcggctcgtcgtcttatttgaggtgcggacctgcagctacgagtttcttgccttcggcgttgccggtgaacttctcgaagttcttgatgaaacgaccggccagatctgccgccttctcgtcccactccttcgcgttcttgtacgtgtcgcgcggatcgagaatcttgggatccacgcccggaagtgcagtcgggatcttgaaatcgaataccggcagcgtcttggtcggggccttgtcgatcgaaccgtccaggatggcgtcgatgatgccgcgcgtatctttgatcgagattcgtttgcccgtaccgttccagcccgtattgacgaggtaagccgtagcgcccgattgcttcatgcgttttaccaattcctcaccgtacttggtcggatgcagcgagaggaacgccgcaccgaagcaagccgagaaggtcggcgtcggctcggtgataccgcgctcggtaccggccaacttggcggtgaagcccgagaggaagtagtatttggtctgttccggcgtcaggatcgaaaccgggggcagtacgccgaaggcgtcggccgaaaggaagatcaccttcttggcagccggggccttcgatacgggcttcacgatgttatcgatgtggaagatcgggtacgatacgcgagtgttctccgtcacggacttgtccgcgaagtcgatcttacctttcttgtccaccgtaacgttctccagcagggcgttggggcggatcgcgttccagatatcgggctcgttctctttcgagaggttgatgactttggcatagcatccgccctcgaagttgaagacaccgtcgtcgtcccaaccgtgctcgtcgtcgccgatcagctcgcgcttcgggtcggtcgaaagggtggttttgcccgttcccgacagaccgaagaagatggcggtgttcttgccctccttgtcggtgttggccgagcagtgcatcgacgcgatgcccttcagcggcagcaggtagttcatgtaggagaacatacccttcttcatttcgccgccgtaccaggtgttgatgattacctgcattttttcggtgaggttgaacacgaccgccgtttccgagttgagtccgagttccttgtagttcttgactttggctttcgaggcgttcagcaccacgaaatcgggttcgccgtatttctccagctcctcgtccgtcgggcggatgaacatgtttttcacgaaatgcgcctgccaagcgacctccatgatgaagcggatcttcagacgggtgttctcgttggctccgcagaacgtgtccacgacgaagagcttcttgttcgacaactcttcgacagcgatctttttcagctccttccaggtcttcttcgtcaccggtttgttgtcgttcttgtattcgggcgaggtccaccaaatagtatctttggtggtttcgtccatgacgaagaacttgtctttcggggaacgacccgtgtaaacgccggtcatcacgttcacggcacccatttcggttacctgacccttttcataaccgcgcaggcccttgcgggtctcctcgcggtagagttcgtcgtacgacgggttgtagattacttccgtagtacccgtgatgccgtactgtttcaaattgattttagccataattattgatttaaattaatcctcttatttcacttgacagcggttgttcgtttatgaacgatgctcgcaaagttaaagatttttttcgaatgtgaaaatattaacagtaggtttatcgtttttcccggcgaatcattcggctgtcgatggcgtttacgatcaccgcgatcgcaccgtcgcccgttacgttggtcgccgtaccgaaactgtccatggcaatgtaggtggcgatcatcagtccgatcatattttcgtcgaacccgagcatcgactccagcaatccgatcgcagccatgatggctccgcccggtacgcccggtgcggcgatcatcgtaatgcccagcagcaggatgaaacccgagtaggtgcccatcgaaacgtccagtccggagagcatcatcaccgcgagcgagcaggcgacgatcttcatcatcgaacccgagaggtggatcgtggcgcagagcgggacgacgaatcccgccacttcggggcggacgccgattttgaccgtctgtgccagcgtcacggggatcgtggctgccgacgattgcgtaccgagggccgtcatgtaggcggtcatcatcgtgcggagcatcttcaacggattctgccttgccacgaggcctgcgatcgagaactggatcagcagcaggacgaccgtcatcacgaagataatcacgatcaacttgaggaaaatgcccagaatacccgatacctgccccgactgagtcatcgagaggaagatgccgaagatgtagaagggcagcagcgggatgatgaccttcgagatgacgcgctcgatgatgagtttgaaatcatccatcatgcccttgagcttgtcgctgtggatgtaagccatgcccagtcccagcacgaaggcgagaatgagggcggtcatcacgcccatcaacgggggcatttcgaccgtgaagaacggttgcatgggtgttgcggcggtttctcccggggcgctcatctccgtaccgcccaatagccggggtaatatcccgaaacttgtgaagaaagttccgaatcccgaaaacagggtaaaggcataggccagggctgcggtgattaccagcagccgtcctgccttgctgcccaggtcggcgatgcccggagccacgaggcccaggatcagcagcgggatgacgaagttcagaaaattgccgaaaatgttgttgaaggtcaatgcgattcgggtgaaccactcgggaacgaagaggccgaatacgatgcccagcgcgatagccaggagcactttgggaagtaagccgaatttatgcttcataaggtgtcgtttcattggttttcggttggacgattcatgcgtcggggccttgggccgatcgtgttcccgattcggaccgaattcgtttttcggaggtcccgttgcatgccgtttttctattaacgtataaaaagggagcaatatttgtgcaaagaagagaatattttctaattttgtcaatatgactgcactgtatagcgatattattttcggcccgatccattcccgcagattgggtctgtcattgggtgtcaatctgttacccactcaatcgaagttgtgtagcttcgattgcatttattgcgaatgcggctggaatgccgaacatccgggcgcccgccggttcaattcgcgcgaggacgtgcgtaccatgctcggagcgaccttgcgtcagatggtttccgaaggtacgcctcccgacgtgattactttcgccggtaacggcgagccgacgatgcaccccgatttcgaggcgatcatcgacgatacgatcgtcttgcgggacgaaatttgcccttcggcgcggatttcggtgttgagcaatgcgacgcagatcggccgcgagagcgtgcgccgggccttgcgccgggtcgataacaacatcctgaaactcgattccgctttcgacgatacggttcggctcatcaataacccgtgcgggacctattcggtggccgaggtggtgaagaacatgaaactgttcgacgggcagatgatcctgcagacgatgttcctgcggggcgagtgcgagggccgtacggtggacaacacgaccgagcgggaggtcgcggcctggttgaagctggtcgaagagatccggccccgtcaggtgatggtctattcgctcgaccgcgacactccgtgcaaaaccttgcagaaagtcccccgcgaagatttgcaggcgatcgctgcccgggtcgaggcgctgggaatcccctgctcggtggcgtaacgcaaagaagagcgacgggggaatttcaggccccttcggagaatttgtcgatcggacgttatttattgtctgtattatatagagggggcgaagattttatctgtgtcttgttacattgtttgctttgctctcgttggcacttttcgcatgtgacaagggcatccgggaggaagcgatcgatgccgaaaatatcttgggtaggtggcgtgcggtcgaggagccggattacgattgggatgattcggacgacgatggagcctgtgatgtgcccatgtatttggggattatgactttcgaacacgatggacggggtgtggccgataacggggagcattttgcctggagtctgacaggaagacggataactgtggattacggatttattccggcacggcttacggtgtcggaaatttgcgagcggcgaatggtgtggaaggttctcgcaacagaagcaggctcggtaaagtattacggacggatcgttttcgagcggttgtgattattccgtcgggaagaaaaataaagcgagaggaatcgattcctctcgctttattcgttgtcgcagtgtggtttatttctccagcacgacgctcactttttcgagcttcccgcccagcgggggcgccagcttcgaaaccgtacagcggatatggcggatttgcggaaaccgggcatagagggcatccatgatgttcatcgacacgcgttcgatcgtgcgctgggtgacgcgcatttgttcgcgtacggtttcgtaaaccaacaggtaattgaccgctttttccacgcagtcctcgctcgccacttcccccagctcggccgtgatctccagatcgaccgtgaagcggttgcccacttgctgttccaggtcgtaacagccgtggaaagcccggaactccatccggttcaaaacgatacggtattccatcttattcggcgattaccaggtagtagtttttcttgcctttctgtacgagcaggtatttcccgtcgatcaggtcgctttcggcgattgcacgcatggggtcggccaccttctccttgttgaggctcacgccgccggcctgtaccatcttgcggcattcgcccttcgaggggaagatatcgctccgctcggcgcacagctcgatgaagggcagcccgatcagttccgcacgggcgattttgtattgcgggactccttcgaaaacctgcagcagggtctgttcgtcgagtttgcgaagcgcttcggaggtagccccgccgaagagaatgttcgatgcctcgaccgctttttcgtactcctcctgagagtggatcatcacggtaacctcctgcgccagccgtttttgcaggattcgcaggtgaggggctgcgtcgtgttcggcgatcaggtcgtcgatggtctgtttatcgagcagcgtgaagatcttgatgtagcgcttggcgtcctcgtcgctggtgttgagccagaactggtagaacttgtaaggcgacgtataacgcgggtcgagccatacgttgccgctctcggtcttgccgaacttggtgccgtcggctttggtaatcagcgggcaggtgagggcgaaagcctcgccgccggccttgcggcggatcagctccgtgccggtggtgatgttgccccactggtcggcgccgccgagctgcagtttacaacctacggtttcgtacaggtgcaggaagtcgtaggcctgcacgagctggtaggtgaattcggtgaacgacatcccttcgccttcgccgttgaagcgtttctttaccgaatctttggccatcatgtagttcacggtaatcagcttgccgatgtcgcggatgaaatccaggaaggtgattcccttcatccagtcgtagttgttcaccagcatcgccgcgttgggagcgtccgattcgaaatcgagcagcttggcgagctgtttcttgatcgcctcctggttgtggcggagggtcttttcatcgagcaggttgcgctcctgcgatttgccgctggggtcgccgatcatgcccgtcgcgccgcccaccagagcgatcggacggtgtccgcacatctggaagtgcttgaggatcattacactcaccaagtgtccgatgtgcagcgaatccgccgtcgggtcgatgcccacgtaagctgtagacatctctttctgaagttgttcctgtgtgcccggcatgatcgagtgaatcataccgcgccattccaattcttcgacaaagttcttaattgccatttgtgtatttggttttactttatgctttattctacctccaggtcgagcgcccggcgcaactcggccagcagaggatttttttcggtcatatacttgacccggtcttcgagtttgatcgggcgggcggcccggatctcttcgttgatcgtgacgtcgagctccagcataccctgcacgccggacgtttcggcgatgcggagcagcagttcggttttgttgcgcaggatctcttcgcgcagggcttccgacggaactgcgatacggatcacgtgtccctgaaattgcatccgttcgaacgccgcgacgaagcgcggacgcatctcgcggacgagcgtgaggattttttcacgggtcgtttcgagtttttcggcgctgagcgggtcgatgaccggctggggtgctgcggcatgcacggcggtttctgtatccggttccggggctgcatcgtttatcagcgccgaaatggagattcccgatgcgagtctggactgtacgggacggggacgcgccgtttgcggttgtgtcgaaaccggcgttgctgcggcctgcgttcgttccgggaccggctgaatggacggcgtcggcattgcggatgtacgggcagcggccgatgtcgccggaggtgcgggatcggctgcggcttttgccgcaggcgttgcagccggagcggatgccgcgattccgggcgaagattctgccgtcgcagccgtcggccgttggaccgtagccggttgaggagcgggcgcgggagccgtctgttgtgtcgattgcggacgggccggtgcggattgcgcgggggcggtccgaaccagttccggcaacggaagatttacgggatcgacggggttattttttttttgaccgagaccggcgatcttcatcagtcccagttcgacgagcagccgttggttggacgattgcctgattttgccgtcgaggtccgtgagcagcgatatggcgccgaaaagaaattcgggagggcaggcggccgcctgcgtccggtatcgttccatcagcgtaccggtaaattccagcagccggagcgaaggctcgttgcgggccaccagcaggtcgcgcaggtggcggttgagtcccgccatgaaagtctggccggagaatccccgtgcgagcacgttgtcgaaagagagcagcgcctcgacatagttgcccgacaggagcgtctcggtcatgctgaagtaggtgtcgtagtccagtacgttgagcgtctgggctacctcctgatagcggagttcctgcccgcagaacgaaacggctttgtcgaacatcgacagggcgtcgcgcatgccgccgtcggctttctgtgcgatcaggttgagcgactcgtcgtcggcggtgattccctcctgcgaggcgatgtatttgaggtattccacggagtcctcgacgcggatgcggttgaagtcgtagatctggcagcgggagaggatcgtagggatgatcttgtgtttttcggtggtcgccaggatgaagatggcgtgtgcgggcggctcctcgagcgtcttgaggaaggcgttgaaggcggccgccgagagcatgtggacctcgtcgatgatgaagaccgagtagcgtcccacctgcgggatgatgcgcacctgttcgatgagcgagcggatgtcctcgaccgagttgttcgacgcggcgtctagctcgtggatgttgagcgagcgcccgtcgttgaagctgcggcacgattcgcacgcgttgcaggcttctgccccttcgggatgcaggcagttgatcgccttggcgaagatgcgggcgcaggtcgtcttgcccacgccgcgcggcccgcagaagaggtaggcgtgggccagttggccgcgttcgatcgcgttcttcagggtcgaggtaatgtgcttctgccccacgaccgaagagaaagtggcggggcggtatttgcgtgcgctgacgataaaatcactcatggcggaacaaagatagtgaaagccgggcgaaatcgggaaaatttattttcgaagatttccgaggcgcttcctatcttctgcaaagatagtgaaagccgggtgctgcgccaaatttatttgcactttgtcgggtggaataggcggaatgaagcgcggtgtatcgttttcgaaaatccgtttcccgcaccggcgatctgttcggtaattttcgcaggtgactcgcttcggtgcgagtatgcctcaagaataaagaaagacggaagccgaaactcccgtctttcgcagtgtgtcgccgcaggtcgccttactcttccatctgaaccgatccgtcgggcagcacattgaaggtgacttcgtaatactggaccgatttcttgccggcgctttcgacgatctccttgccgttttcggttatgttcatactgaactctgctttcacttcgccgaacgttttatttcggtcgaggaattcgttgcccgaaggaaccgtttcctgaatcaggtagtcgccgatgctcttgaacgtatagttttcggggatcatggctttggcctcttcgtactgtttgcggatggcttcgacgttgatcgaggccggagtcaggcctttgactttttcgaaatcgagtttccctctcagcccgcctgcttcgtccaggtcggagatgttgcctttgccgggaccggagagcgtgaaggtctgcgagaaacagtcgccggccttgtttaccatttcgacgaataaaactgtcaggttattctccagctcgtccgcctccatccagcggatttcatatattttccactcgtcgaagttgatattcttttcgagagtttcgacgatgagttgcgtcgcttcgtcggaatccattttcggagcgttgatgcccaggttgttgcatgaagagatcagagtcgcgatgcagagcgatgccgtaatggcgaggataagttttttcattctgtctgattagataatttggttttgtcctgcaaaggtagccattttgtcattacgatgttgtccgggatatgacaaaatcggacaggacggcagaagttgcagacttggcatatattttgcgataggtaaggcaaagaaatgaattgaaaataatataatgcactatgaacattaattctttaactattaaggcgcaagaggcgctgcaggctgcggtgtctcttgccagggagcagggcaaccaggctgtcgaaccgctgcacctgctcaatgtactcgtgcgcgaggacgattcgctgtcggtatttctgttggggcgtgtcggcgtaaacgtgcggggactgcgcggcgaagtggagcgggccgtgcgggggttgccccatgtttcgggaggcggcgaacagttcttttcgcaggatacgaccaaagtaatccagcgtgccgtcgattttaccaagaatttcggggacaagtacgcttcgatagagcatttgctgctgggattgatcgccgagcggggtactgccgccgatctgctgaaaggcgccggggcgactgaaaaggagttgctcgaggcgattcgggtgttccgcaagggggcgaccgtcgattcgcagacggcgtcgcaggagttcgatgccttgggcaagtatgcgatcaatctgaacgagatggcccgcagcggcaagctcgacccggtcatcggccgcgacgaggagattcgccgtgtattgcagattctttcgcgccgtaccaaaaacaatccgatgttggtcggagaacccggcgtgggtaagacggccattgcggagggtatcgcccaccggatcgtgaacggggatgtgccggagaacctgcgctcgaaggtgatctattcgctcgacatgggcgccctgatcgccggggccaagtaccagggtgagttcgaggagcgtctgaaagccgtcgtgcaggaggtgaccgccagcgagggcgagatattgctcttcatcgacgaaattcatacgttggtcggagccggcaagtcgtcgggtgcgatggatgccgccaatattctcaaaccggccctggcgcgcggtgagctgcgtacgatcggtgctacgacgctcgacgagtttcagaaatatttcgagcaggacaaggcgctcgagcgtcgttttcagaaagtcatggtcgatgaaccgacggccgaggatgcgatttcgatcctgcgcggactgaaggatcgttacgagaaccaccatcaggtgcggatcaaggacgaggcgatcgttgcggccgtcgagctttcgcagcgctacatcacctcccgtttcctgcccgataaggcgatcgacctgatcgacgaggcggcttcgaaactccgcctggagatgaactccgtgccggaggagatcgatgtgctggatcgccgggtacgtcagctcgagatcgagcgcgaggcgatccgccgcgagaacgacaaggagcgtgtcgagcaactgacccatgagatcgaggagctgggggccaaacgcgccgagcttcgtgccaagtgggaaggcgaacgggacgtgctgaagaagatccaggagaacaaggaccggatcgaacacctgaagatcgaggctcagcaggctgaacggcagggcgattacggccgtgtggccgagattcgttacggcaagattcaggaggccgagaagcagatcgcggctcttcaggatgaattccgtgcggcttcggccagcggggcgatgatcaaggaggaggtcgatgccgaggatgtggccgaggtggtatcccgctggacggggattcccgtttcgcgtatgctggcttccgagcgtgagaagctgctccacatggaggaggagttgcatcgccgcgtagtcggtcaggatttggccattgccgccgtgtcggatgccgtgcgccgttcgcgggccggactgaacgatccccgcaagccgatcggctcgttcatcttcctgggtacgacgggtgtaggtaagaccgagctggcgaaggcgctggccgagttcctcttcaacgacgacaacatgctgacccgtatcgacatgagcgagtaccaggagcgtcacagcgtgtcgcgtctggtcggtgcgcctccgggatatgtcggttacgacgagggcggacaactgaccgaggccgtgcggcgcaagccttattcggtcgtgctgctcgatgagatcgagaaggcgcatcccgacgtgttcaacatcttgctgcaggtgctcgacgacggacggctgaccgataacaaggggcgtacggtcgatttccgcaatacgattatcatcatgacctccaacatgggggcacaggtcattcaggagaatttcgctccggctttcgacggcaataaaatttcgccggaagtggtcgaaaagacgcgtctggaggtgatcgagcagttgaagatgcagctcaagcccgagttcctgaaccgtatcgacgagatcgtgatgttcgagccgctgacgcacgaagacatcgggcggatcgtcgatattcagatgaatatagtccgcaagctgctgaaggaaaacaacatcgagctcgactatacgaagaaggcgaaagagtggatcgcccgcataggttacgatccgttgtacggcgcacgtcctgtcaagcgtacgattcagcgttacgtggtgaacgatctgtcgaagcggattttggcgggtgatgtcaatcgcgagcatccgatcgtcatcgatgccgacgccgatggcctgaccttcaaaaactaaaggcgaagcgcttttgtcgggtagagatactcgtattcgtgaaaaatccccgctgtttttacagcggggatttttttatgggacagggcggtttaacgcaccgaaaatccttcgtcggctttcatcggcatcggtttgtcgcggtagaagccgctttcgagcttgttgcggatggctttgaacgcctcgatcgtgaacttcacgtcgtcgagcgtgtgggctgccgtcgggatcaggcgcaggatgatttcgcccttcgggatcaccggatagaccactaccgagcagaagaggttgtgtttctcgcgcagatcgacgatcaggttggtcgcttcggggatgccgcctttcatatagacgggagttacgggcgactgggttacaccgatctcgaatccgttctccttcagtccgccttgcagggcacgggtgatttcccagagcttctcctggtattcggggtgcttgcggatcagatccagacgcttcaacgcgccgatcaccatcggcatcgggagtgacttggcgtagagctgcgaacgcatgttgtagcgcagcaggttgataagccagcggggaccgcagacgaaggctccgatgccggccatcgacttggcgaaggtgttgaacagcacatccacaccgtccacgacgccgaagtgagcggccgtgccccgtccgtggggacccatcgtgccgaagccgtgggcgtcatcgaccagcaggcggaaattgaaatctttcttcatcgccacgatctcgtccagtttgcccaggtcgcccttcatgccgaatacgccttcggtgatgacgagtacgccgccgttctgctgctccgccagttccgtagcgtgcttgagttgcaggcgcagcgacgccatgtcgttatggccatatacgaaacgcttgcccttgtgcatgcgcaggccgtcgatgatgcaggcgtgtgcctcggcatcatagaccaccacgtcgcgcggggtgaggaggcagtcgatgatcgagatcatgccctgatagccgaagttcagcaggaaggcgtcgggtttgccgacgaactctgccagttcgcgctccaactgttcatggtatttggtctgaccgctcatcatgcgggcgcccatcggggcagccatgccgaattcggcggcacctttggcgtcggcttcgcgcacttcggggtgattagccaggcccaggtagttgttcaggctccagttcagcatcttctgtccccgaaaggtcatgtggggaccgatttctccttcgagtttggggaatgcgaaatacccgtgggcataacccatgtacataccgatagggcctccggcattcttttcgaggcgttcaaaaatatctaccatacgagttcgttatttgattttaagattatgcgtttcagtagtccacaaaagtaaaaataattgtcgggatgttcaaacctcccggattcttttcgtgaaaagtagtataaatacttactgtttgtcaccggataagcggcattggatttcccccccccctgcatcccgtttttccggtcgttgttttcgtggttccctgtatttctttagtatagatttcctacgctgttcttcggtcgtctttttgagttcttctttacgggcatcgtcccgtgtttttttatcgcttctcccgtttctgaattcaggtgtatatgttcccaaataacgataaacttttcgtcgggtcaatcttgattttccggaactttcgtgcgaaatttgtccgtacaataccccgcgtggtgttcgtatttgaaaaacattttctaactttgccctgcctgcccgtatgggcggcgacatattagtttagtgaaagtgtttcgctaatccttggcaggaaatctggtaaatgttattttacttgtatttattttgttgtacaccaataaaatagcagtcatagcaccttgcaaaagaaacagaatagaaacaaaatcggtattttaggatattcttcggtttttacttttcacttgattttattccttgcatttggttgcacacaaagtgtttctcaaagttactctccccacgacttaccccttcctcaagaatatcgtttggctagctatagagaattttgcagccaaaagagaaaataggcaaatgtacatcttaagggtatacgctcattgttttttgcaccacgcaaaagtaagtacttctatcaaatcataggcatatatgaaaaggcaaatatgcctacctatatttagtttactttgatttagcatatatataggctaatagactaaactaaactgaattttcaatggatttccacattctatcctacacatatgcacagccaaaagagaagaaattttcaccatgtgtttttctcttttcgatgcaataatatcataatttatcggatagaaatgaatacaggtttgtttgccccattttattccttataaagttacttctactgctttgtggaaggtaatctaattaattcgcaattaaccgtatctattgttttttcttggtcaaattttactgctttaaccaaattagcccagtctcgaaacttcatttcaggactatctccataatgcgcttgcacaacttttattgcttccaaggtatggggtgtatctatagctaaaaggggtcttagcttctctagtaacttgacatctgaaatagttgtaatcttaccattctcgatagatggagtatgagttatcacttgtgccttaggagatgaattttcgaaaaatgaatctatattctcaaaaaacatcaataagtccttacgcttaaaaaagactggttcatcatcatttttcaatcgcttacgcaataattcgcctggagaaacttcttcttgaaaaaatgttcgtgaataaaacgacacgctctttctttcatttaatcgttttttagcaatatgaaaattccaacatactaaaacgtcatttattctatcatagcccaagaaaatgaaaggataggcagattcctttatttctgagaattcatcttttattggtagttgagctcgtgtcgtatcaggtctatctttaaaatatgcagaagaaagattttttacatacacataatatttcctcccttttaacgacattaaaaagggttgtattccgcttatatattgaaaactgtctgcttttgcaagtacattcaacattagctgaagcaatgtttctggtagaactttctcattcatcatacgctataaacttgaaaatagtttactatgtgggtatattgcagcaatattatccggaacatcaatttgtgataaatcacaatcgaaatggatattagtaatttcattcggaatactttcactattcaatgacggtatatatatagcaggaatcagtttataggaatctactgcctgttgataatcaaaataaacatcatataccttttcaaattcagaacctaatgttcgaaatataatttcatttaacttataccgcaattccaatgaacaaatttgagtctctatgtcctcttttaaatcaaagatattttttcctattccagattgaataacaaagatcgaagatataatcaaattggtgttttcagtgggagataattgatcatacgaaaatttatgtattctatgagatttagatgtgctttttacctctattttatctattccatcattaaaatcatatacatcatttaatgaagaatgccatgcttttaataaatattccggattactggctatagatataacaaacaactccgcccataagccttgaattgttttttgtggaggtaaattaaagcatcgaaataaatcaaccaatttttgtatttcatcatgcagttgtttttgagtaggataattgcctaatttacttaatacaatttctactacatctatgaaataattgatataatcgacattctctgtttgcaatgcaactattgtatagtaattctctatcggtttatccgtatttgacaatttcaatctacataattgattgaattgaatagagattaaatccaattttatgttcgaaagcgaactaatattcgaactagcaataaaaaagattggaaacccctcataagatatgcctattttatgcgtatcagaaaaaggaatattatcagcagcataacaattatgctccgtcaaaatttttgtttgtagtttactaaatatggaatgaagtgatactttcatattattcttctgtttctacataattgattgcgaattcttccggataatatatcgccaaagtataagccgttcgtcccgcccattgagtagaattgcattttagttttacatgatgaatctgaatacaaattgagtcttcaaattttatattcgcatcaccaggatatacggtactaccggacatcgaacgtccagaatgcaaattatttattctaaatgtatcaatatcaaaagcacgttcgcggggtattcctctatatgccatttgtatgatatatgcgtactctaatgctccttgttttttggtacttaagtattttatatatcttaaagttgcctcttttcttgcagcatcaggcatattctgaaatttaaactctgttaaaaattcaatgattctctgaattggaagcttgacatatccatgatttcgatcgtccgtaccataattctcaaacaatttcaattctacatctgcaaggaagcggtttacaaatgtggtattttcatcaattgcttggaacgcattcattttacgccatccattcaattttgttgttacagtatgtttagataagatattttttcgcgtggcatttaatctattagagattaatagtagtcgctcaacatcttcaaggtttttattatcgagaagccattttctcatttcttcttcatgctctacatattctttgtattcaattattacctcaaaaggtaaaaacacacggcatgaccaaagataattttgcttatatccaaaaaaacgacatcgctgttgaattgtatctgcggtagattttccgacactacatctcggcatatatgttactgcaagatgctctacagtaaaaccccgattaagcatatctgctccaaccaatatgtgagaacaactgctagcccaatcaatctctttattttcaccttgtctcttattcctgcttataactaattcaacattggtgtcaagaatgatatcatctatacagcaccagatatcctcaaaggatggggctgactcattgtgagcttcatacatccgtatagattctggataacattttgcaaagctatctttcaattcttggtagcccaggtcttgttctccattagctaaaatattcgaccatgcatcaatgatattttttatccatctataaaatttctcgctcgcatcttgatctctatccgcatgtatcatcatagataaaaaagattctttctgtaaaagttttactatgatagcaacacccattaaatgtaactgtaaggcgtttacaagtgaatccggacaatcagcaaggttattgtgctttgaatgaaaaacttctccttcaggaattgttatgattaaacctggctcatcacaaaaaaaagttttgccaccagtataagttttgccaggagtcaaaacagtatgatgcttaggtgatagtaagtccattatacttattaacaatggtccttgcggagttgccgtatattgtatgtaggaatggtttgccaaagccccctttaatttcatgatactactatatgtagttgtatattcatcatcttcccattcttctgatttactatttttgtaagcatagccattcagacttgcttgatcagcttcatcatcaataattaaaactcctgcttttcctaatgtctgtttaagttgcatggaattaaacattgcagccaagtctgagatatacttatgatgtttaagcactgttatcaaaatagttggtttagaactaatattcaaagcattgcgtatcctttgcgcatattctaaagtcggattttcaaaaagtttatagtatgcgctatttgcacttccattaattaaatcctttcttaatcgtttagtggtctgagaaagaagattgtttttagttccggcaaagtatataattatacgaaacccattgtcgtgagcaagtgcagaaagcgttgtgaaagacatggttttaccactttgtacataacctaccactagattggttacagactgcacttcatttttgtaggggtttgtacaatgcgataagatttcaattgtttcagaactcaatgtatcgatgccatcttcatctaatttttgcccaaaacgagacaataattccattgttcgttcccctatgactggagaaaaatcatttttatgagtattgagtatttctatttccataactactgcaaaatattttgattaaataatatacgcaaatttgatgcgaatttagtgcctttatctggtgccataatttcagctaacgtcaatgccttaaaaatagcaactatcggtgcatagtcctgtccttttttaaaatgctcaaatctcgtaaagaacggatgtgctaaattaattttgcatgatattgatttggtatcaagaaatagattttcttctgtgtcagtagtaattacagagtacaaagaatcagtttctgtttcagttaccaaatccattgtgaggatataatttttcccattgtattgaaaagattcactatagctatcaagtggttttgcatttataattacatcttcgtttttctgcaaatattgttggttgctaattttggcttccacttcactaacttgacgagatagttgtttgggttttgccttcttttccaagtccttttttatagctttggagatttttgtgtattgatctttaccgcgttgtctataattatccgtttgcccaagaatattcagattgtccgcttttaattcatcctttaaggcgtccataaaaagatataaatcttcttcttctctgaaaccatttttattaaatgatacttcaaaaccctctaattcaatttctccgaataaacgtctgtatctaaaactaccagactgtccaaatataacagttgggaaatacctctcatctcctcctccaacaattactcgacctcgacgcattaacactaaaccatttgctccattttggattttatcaagtattgctatgaatccttttgctttatattcccccatttcaaaatctatttcttttctccaaagaatattttcaccatcaggagttttatagaaaggggcataaagtattccataatctggtgcttcaagactttgaccatttacaatgatctcaacattcccagttctaaggaactgtctgtaaatacttgataagtgtctgcgtatcttttccatttgccctggttttggcgcatttgtggataattgagataatattattcttgtataatgctcattagctggagcatttttctcaatcacaacaagttcttccttttcctctgttgttactttttgtaaatcaaattcagtaaaacgttcaacatcttctcctaaagcttttgtatatacacaccatttatttgcgagccaaacagatgctgttttcatacccattccaaattcatttaagccggtgtcatccaatggaatatgcgcaggctcaaaagccctttgatagtttacagcatcaatacctgcggcattgtcagatattaaaattgttctattctcccaatcaacagaaatctcaatgcgaagtttgtaattagattctaaatcaaataattctgttttatgattcaagaaactttgcactgcattatctacatactctcccaatgtatttgagacggtattgtttaaatttcgaaatgtactatatacattgggttttaatgcaattgacaccttatttatttgtttcatttccatcaaataacaaatttattgcaatacgttttacaacttctacattaaccgcatttccaaaagctttaaatgcgctggcaatcgtatcaggatattccgccaattcttccatacattgaagtttggctccttcttttcttgtcatgtaccgacctttttctccattgggagttatcaaccacggaattataggaatttgagttgttgttaacaccaatgcaggcgaataggtcggcaatttcacacgcattccagatggacggaactgaataattttattatatattgtagggtgttcttcataaccacaattccattcaaatttttgatggctattttcgaatccttcttgcttaatttcatcaatccatgcatcaatccatgatttattatcttgatagaattgtcggttctgtctgatgaattgttttttccaatccgggaattgtcgtcctgttttaggttttccttgagaatatatgggaagaagttgcaaaaaatcatcttttgagtttccaactatatcttctccaaatttaccttttttcccagacaattgttgccgtttctgaaagtaaggtgctaccccctcgtaatcataagtggcaccaaattccattgcccaaatagggaatgttggtagtgtactcttattttgagaaagtaaatccaagaatttttgccatgctgccatgtgctttctcgtgactggacgtaaagacatatagtctgtatcttcaggaattagtatttgagaaatatcacagtcaggcctttcctcatgttttggaaatgcaaaagtttgcaacccacctctactttttaaacgaccaacaatatacattcttgttcgatgctggggaataccaaaataatggggagatataatatcttcttttacctcataaagcattgatagcttttcatgaattacacgatacgtatttcctttatcatgagatttcaagttaggaacattctcaagaaatacaaattcaggcttgtgaaattcgagaacttccattattttattaaacaagttgcccctttctttctcatcctgaaacccttgttgttttcctgcttgtgaaaatggttgacatggaaaaccaccacataaaatatcatgtgatggaatgtccttttcgatattaataagattaatatccccagcacacttcataccaaaattactctcatacaaagtgcgtaaatcttgctggagttcactagcaaatacacatttgcagcccaattgctctaaggccaaatggaatcctcctaatcctgcaaataaatctataaacttatatgttggcataattggatcgtttttaaatttggtgtcataattaatttttcagacatccaataggtacaacatagactccatctgttcgcttataggcaaaatcaccaacgcctgtcagcaccatacaaaaagcaggagctttcattcgagatgtatctatgatatttgagagtgccattaatgtttttgcaccatcctcaatcaatttctctccacccaattttatttcaatgagaccatacgaaccattacgcaaatgtactacagcatcacattccaaaccattcttatctctataatgatagacagaaccatctaaggcatcagcataaaccctaagatctcgaatacacattgtttcaaaaaataacccaaaagtatttaggtcgttaattaaatcattgggacctaaaccaagggctgccacgccaaccgaagggtcaacataataccttgtatcagatgtacgaaccgctgttttacttctcaagttaggattccatgccggcatatcctcaattacaaatattttccgcaaagcggtaaggtacgcatctatcgtttcatcgctgacatcctctggttcatttgttgatatgtcggcaaggattgtggcgatacttgcttgagagccttgatgcctggcatatgaacgcataattctttttgcccgttctgcatctcgttttacattgtctactcgtgatatatcgctatttgttatcgctttataatattctgttgcctgtaatagtgccgccttttctgttttcttttgcaaagctttaggccaccccccacggcaaacaacaaacgcaagcactggcaatgtaagtttattcaaggctcctattttatccggggcaaggaacagttccgacagacttatctcacctgtagaatcccctgattcccacaaactcataggacgcatggtgagccatccatatcttccagtacctgtgtggtgaatttccttagcttcgacaggtacagcagaacctgtaagcataaactgcccgtcttcatctcggtgatctacttcaaaccgaatagcatcccaaaattgaggaacttcctgccattcgtcaatcaaacgaggagtttccccttcgagcaaaaaactaatattggtttgagccatttgcctatattgctgttgcttagtagggtcatccatatagataacacttttggcctgttgttcagccgtggtcgttttaccacaagctttaggtccctctatcaatacagcacccatcgcctctaatttatcacgcagaagttgatccgctattcgattcttatattccatacaccgtatttttctgcaaagatagcttatttctttgtattccaaatcaatttcaaaaatatatttggaaatttgacgcaaaatcatttggaaatttggctttgtttcgattggaaatttggcgtataattattttatactattgcggtgatattatttacggcattttctttggaatattctctatctctgacctcataattaggtattaagcatttgccacagccgttttcgtttgggcttgcccgtgtgccacgaaatatctttcgggggagcctaataccccaaccgccttacggcgtcgggtaggctgccatacaatctgcaagcagaggcggtgggattatccgatatatgacggattatagaatggcagtcaaatggataaacagcctttcccggtcggaagattttagacctcaattcgcgaataggttttaaccgacaaaagggagctgaaaaaattgttaccaataattgtttctcgcgggttaagaacggatttgcttctccgacataatccgttcatttctcagcggtcgaattacgaccttttccttgtcgataatgctaccggcattcgagtgtaagaatcctgttttagagtacgatttcggtcatcaaagttcaaccgcatttcttttcagttgtttgcatgaaacggtttactttagttttcttgccctatatatagagaaatactaaactaaacagaattatatatacccgcgcgggaataaactacacctgcaaaaaaaacatcgggaaaccagaaaattcggcagttgctttagtcgaataatccgtttactaaattgaccgcatcgtcctttttctgattgatgattttggcgtagacttgcgtcattttcacatcagcatggccgagtaatttcgaagtggtgtagaggtctgctccgagcgtcagcatcattgtcgcgaacgtgtggcggctcgtgtgaaatgaaaaccgcttatctattccagccgctttcgcccaaggtttgagaagcgtgtttatcatcgttgggctcggcaaatcgaatacatgatcttccgatgtcttctctccacgttccggcatccacttcaaggcttcgggggaaagcggcagataaatcggctctttggtcttttgcatagatacagccaaacgatattgtcccctatcaacaaagacatctttccactttaaactgatgatatcgcttatccgcagtccgcagaagcaggagaacaaataagcctgttttacggcttcgtttttcatcggagcagcaatcaatgcccgcacctcttcaatggtcatatacgaccgcttgctctccggcagacggattttatccgaattgttgatcttcgtaaaaggattgacttttataatttccgctcgcacggctgcattcaaagctccgttcagaatgcggtaataggtgtgtagcgtaaaattagatacttgtttgcccttcggtcgatattcagtcaatagatagtcgatatactcttgacaaaacgccttgtcgatttgatccatcgttacccgttctccggcataatttttcaagatgcggatagtaacttggatttggtttccatctttctttcctcgcttcgcctgattctctttgtaggtttccatccagtccagaagaaaaaccttttcacgggtttcgatacccgcttcgccgttggtaagttgaatgattcgtttcgatttgatggcattggctgcggccatagtcgtttgattccgcacacgggcattgttatccgtttcggggataagatacatcttcagatactcatacgtccgtttgccgtcccgatagatatccaaatacagacttttgtttccattggccaactctttcatccgaagacggataggttctttgacttttgcgggcttctttactcgtggcatagttcctccttgctttactcgttattcctgccacaaaggtagaaagaataatccgaattaaggaacaaataagaaacaaaaatgtaccgaaaaagaaccaaacaacaataatcaagtaaaacaagagaagatgtagatacagcgtaattacttattatacagattgtttattttcacttgattagtttttgttttctccttcaatctatactatataaatctggtaaatttcaaagtacaaggataggcaatacgacactcatcaccgtgcgtagttatatatcattatccagatatagactattcggtgtggggtattgtttatttgtacttgggcttaccagagcctcctgccagataaacgaacgactccacactttcttttttgtatagagttttcttataggagtcggtgagacgtattgctaaattatgaataatagtgatttatcttttctgacagactgcagtaatgaacaattgagattgttagcggatgttttagtctttgatcctaaggatcataagaagcgttatacggagaggttgtctgcaagagcatcgtatgccgtgtattatccgcacgacatgaagaaactgttgcctgaaatcgtggacgaataccaacgtttcggaggaaatacgattgccaatataatacgggggcatggagtcccgtaccgagagatactgaaagatgtgtgcaaaacagtcggtattgctaaaagtgatactgatacagtcgaaataatggaagccgcgcttcttaagactgtcgcagataaaatgttggagcagattgcaaaacaaaatgcttccggagaacagtcggtagaagagatgaaaaaatatgtggaagaatttactcattacccggatcaaatgacggagctcattttgatgtctttcagtagttggcttagtcatatgggagtaaggttggtgatacgatatgcgagtgggcgagttgttatggtcccgttaggtcctattgcatgggcgattactgctgcttggatggctttggattttgcttcgccggcctatcgggttactattccttcgacgattttaatagcttgtttaaggcatattcacaataaatctgagagggattccaatatttcattcagcatagaataggtggtaatcgcggtcttcgcttattcaaacgtccgatttcataaaaaattcagccggacttctttacaagtccggctgaatcggaaaaatacttttatacaagaaaaattcgcttaattgatgtttttacggtcgggaaccgtattgggcgatgcagcttccatgtcggtttgcagcttgaccatctgaatggccgccgctgccgcttcattgcccttgtttccgtattttccgcccgcccggtcgaatgcctgttgctggtcgttcaccgtcaggataccgaatgctacaggcatattccactgtatctgcaactgggtgataccctgtgtcacgccctggcagatgaaatcgaaatggcgggtttcaccctgaacgacgcagcccagagcgatcaccgcatccacgtccgtatattcggcgaaaaactgggtaccgagagtcagctcgaaagtgccggggacatatttgatctgaatattcaggtcgctgcatccggcgctgcggagggtttggaccgctccttcgagcagggcttccgtgatttcccggttccactccgctacgacgatgccgaacttcatatcggctgccgacggcagcggggcgtccaactgcgaaaggttgtgatgcttggttgacatgcttggattcgggtgtttcgcgttattgctggatcgtgcccatcagtttttctgcattctgtgcttcggccgatgcagggaattcgttttgaatccgctgggcgaatccgagcgcctgctctttgttgcccatggcattggctgccagagccgctttacgcaggtacatcggggccgtcaggttgttgtccgaaaccttggctgccttctcgaacagtttgatcgctgcggcataatcgcccttctcgacggcgatatcgccctgcagacctatgttctgggcattgacgatctctgcgggaatgcctttggccggtttgtattttgccaggtaggcggccgcgttgtccaggtcgcccaaacgcaggtagcagatgccggcatagtgcttggccaggttgcccgcacgcgtggaaccgtactggtcgatgacatcgaggaagccggggccgttggcatcgccttcgagagccagctggtattcgggcgtggtcgattcgaaccggtactgggcctgagcgatcatctcggccgccttacgctcgcggggctgcgagatcaactgtcgatagccgaagatggctgcggcgagtacgaagagggccagcagcgcgatgatcatcgatttgctgtttttctcgaaaaacatctcggttttattcatcgctgtgccgagtgcttcctgctcgttttgctttgtcatagaaatatgcagttttagtttgaattttcgcttctaacgtgcaaaaatacattttttctttgaataatgccaatatctgccgagaattgtagagccgccacgaagaaaaaagatgaatttcaccggatgatgaccgcattgaccagtcggattttcgagcggcggttgatttcggcgcccaaggcttcgcgctggtagaaaagttcgttgcgcagaatgctcgagcggatgcggacgtgcagaatgtgattttcgagccgcagctcggtggtttcggcgtcggctgccggaccgacgatctcgcgccaggtgtcgcgcagccgtccttcggcgactttggcggcgacgtaaggacgctggaaaaattcgtcgagcagttcgccgacggtgaccgtcttgcttcgtttcatcgcacgattcctccgttttcgaccgtgaagagcgagtagtcgtcgcctgttttgtccagaatggtgcgcagacgcgtcgggttgcagtcggtgatgaagatctgtccgaaaccgtcgtccccgaccagccggatgagctgttcgacccgcccggcgtcgagtttgtcgaagaggtcgtccagcagcaggatcggtttttcacctttggcttgggcgaccagggcatattgggcgagtttgagagcgatcagaaacgatttttgctgtccctgcgaaccgtatttgcgcaggggatagccgccgatgcggagtaccagatcgtcgcggtggatgcccgcagtggtgaatccgttgacgaaatccttttcccgggacttgagcagcaactcttcgaaaggggtgtcgttcagctccgagcggtattcgagcgtcacctgttcgcggtcgctggagaggtggcggtagtatcgggcgacttcgggttcgagcagagctgcgatttcgctgcgtttgcggtggatgatgcctccctgttcgaccagctgacggtcgtatatgcagagcatctgttcgtcccgcgagattttgagcaggcggttgcgttcgcccaatacggcgttgtagcgtaccagagcctgcagataagcacggtccaactgggagataaaaccgttcaggtagcggcggcgttcgtcggcggcatcgctgatgagcatcgtgtcggccggggagacgatcaccaccgggatcaatcccacgtggtccgagagtcgttcgtactccttgccgttgcgcttgagggttttgcctcctttgcgggcgaaggcgcacacgacgctctcgctgcggccttcgtcggtgaggtactggccgtcgagcaggaagaagtcgctgccgtggcgcatgttctgcccgtcggtcatcgccagcgacgacttgcacatcgaaaggaaatagaccgcgtcgatcacgttggttttgcccgctccgttgtcgcccacgaagcagttgatgccgggccggaattcgagattctcttcccggatgttcttgaaattgatgagcgacagttttttcaggtacatgagtgcgttttttcgtcgatgccggtatgagcggggacgatttcgtgtttatgcgtgcggtgttcgtacatttgggtttcggtccggacaatacctcatatgcgaggcgagtcgtgcagggtctttctgcggagttggtacgctatgttcccgaccgtgcattgctccgaagtgtgaatttctccgtgatcggattctccttgcgtcagtttgacgcggccaccttcgtcgtccggggccgcagccatttgcaaaggtagcgatttttttgtttttgccgatcgatatttccggattccgcgaaggaggggggcatgcgggggcggtctttctttcgggcgatccgacgaaaaaggccgatctgtacgatcggccttttcgattgaaacggaggctggggattactcctctgcggttaccgtaaatttgatcgtcgctttgacatcgcggtggatcttggcgacggcctcgtattcgccgagggtcttgatgttctccacggcgatggtcttacggtcgatttcgattcctttggcagccaaagcctcggcgaggtcggcagcggtgatcgcaccgaagatgcgtccctcctctgccttggcagcgattaccagcggcaggttggcgatcttctcggccagagcctgtgcgtcggccaggatcttggcatccttgtgggcacgctgcttgaggttctccgcgaggatcttcttcgcggctgcggtagctgccttcgcgtaaccctgggggatcaggtagttatttgcgtaaccgggttttacgttcacgatgtcgttggcgtaacccagattctcgatatccttgataagaattacttccatgttctctcctcctctttattatttcatacaatcggttacgaagggcaggatcgcgaggtggcgggcacgtttcacggcctgcgctaccttcttctggaacttctgcgaagtacccgtcaggcggcggggcagaatcttgccctgctcgttgaggaacttcttgaggaactcgccgtccttgtaatccacgtacttgatgccgagtttcttgaaacggcagtacttctttttcttgacgtcaaccgaaacggggttgaggtatctgatttcagactggttgttgttttcctgtgccatggtttactcctcctgcttgttagaaagtttcgcacgacgtttctccgagtactctacggcgaatttgtcctgcttgaaagttaagaaacggatgatccgctcgtcgcggcggtactgcgtttcgagggtgttgacgatcgagccttcaccggtgaactcaatcaggaagtagaatccggtggtcttcttctgaatcgggtaggcgagcttcttcaagccccaagcctcgctgttcacaatctgaccgccgttttcggtaattacaccctggaatttgtcagcgacctccttgacctgtgcatcggaaaggaccggcgtgacaatgaaaacggtttcgtaattgttcataatcgtttgttaattagattaatatgcatttagcggatgcaaaggtacaaaaaataatgtaaaaatcgtcttgcgaggcctcttttttatttatcgccggcaggatttatttatatatattggtatattttcggtgccgctgccgcctggctgtttgccgactggggctgtcggggccggggcgttcggtcggaaggagggcggagcgtgccgtttgtctggtgtgtccggtgcgagccgagttttgcgcggactccggggaaaatttttcttccggaaggaggatgaaacaacgggattcctgtcgaaggaatcccgtgaaatagatgtgtatgaggtcggagttacttccgaatggaatcgatgacctgacagatgcggtcgaagacttcatccatggtgcccagaccgttgatgtcggcgaattttccctgtttggcgtaaaagtccgcgacgatggccgtctgttcgtgatatactttgatacggtcgcggatcacctcctccgaagcgtcgtccgctcgcccggactctttgccccggagcaggatgcgttttaccagctcctcttcgggaacgtccatgtagatcatgacatcgaccttcaacccctgttcggacagcatccggtcgaactcctcggcctggtgcgtcgtacggggaaagccgtcgaaaatgttgcctttcgcgtgtttgtgcgccgcgatatagtcggcgatcatgtcgatcaccacctggtcgggagcgagtctgcccgtggtgatataggactccatctctttgccgagtttcgtcccccgggcgatttcttcccgaattacgttaccggtcgatacgtgatcgattccgtatttctctttgagccgcgccgcctgcgttcccttgccgcatcccggggccccgaataaaacaatgttcagcatcggttaagaattttttaacgctaacaaatataatctttttttgtcaaaacgacaaagtttcggtatctttgtaagatatagcgcagatttttcgaatttcgctgcgacgataacccgcacgggaagagaatccgtatgcgggaggtacatacgactgtaaacaatattcctatggctgataaaaaacctaccgagatcgcctcgctcggcgaattcgggctgatcgaccacctgacggattctttttccgtgcgcaatgcctcgacgcttcggggggtgggcgacgatgccgccgtgattgcggcgggggccgacgaagtgacactctgtaccaccgatctgctgctcgaaggggtcgatttcgatctgacctatttccctcttaagcacttggggtacaaggctgttgttgtggctgtcagtgacttgctggcgatgaacgggcgtcccgagcagttgcttgtgtcgctcggggtatcgtccaagatttcggtggaggcgttggacgacctgtatgcggggattcgattcgcttgcgaggagatggaggtcgatctggtcggcggcgatacgaaggcttcggtgaccgggctggctattcacgtgacggcgctcggacgggcccgcaaggaggaggtggtttatcgcggcggcgccaagcttcacgacctgatctgtattacgggcaacctgggggcagcctacatgggactgcaactgctcgaacgcgagaagcgggtgttgcggggggtgaaagatcccgaacccgagttcaaaggaaacgaatatctgttgcaacgctacctcaagcctgccgcccgcaaggatatcgtcgagctgttggccgaggagaagatcgtccctacgtcgatgatcgacctttcggacggtttggcgagcgacctgcttcagatttgtaaagcctcgaaatgcggagcccgcatttacctcgaccggatccctatcgcccgtcagacgacggctttcgctgaggagattcataccgatcccgtcgtggcggcgctcaacggcggcgaagattacgagttgctgttcaccgtgccgctggccctgcaagagcgggtgatgcgcatgggcggggtcgatgtgatcggacatattacggcggaaaatacgggagcctatctcgtaacgcccgacggcggcgagatccggctcaaagcccagggatttcgggataaggagtagggctatttccgcaggcccagatgcgacaacagggaccggaagcccgttttgatgcggcgaggcagattgacgccctgccgcagcatgacggctccgcacagaatttggggattccattggcgcagttcggcatagcggaccagtacgaccgagagggccggaggcggaaggttgtccagatgtttgaaaacctctacacagtcgttgcgtgtcaggtggcggcaaaaccggatgcggttgatgtcgatcagtgcgaatcggtatttttcgccggatttgtaaaagaatacgttgcctgggttcatgtcgaggttgaacactcccttttcgtgcatttcgacgatgaaagccgcgaaatcctccagaattttgcgggattcttcatctccttcctgcagggtattcagcaacgggtgggcgatgaattccgaaagaaaataccccgtgtggaacagaccgtgacgtgagatttccaggtaagcgaccggggcggcggtttcgaatcccaactgttgtaaccgcaaggcgtattcgtaggcccgacaggctttgcttttgcggaaaagagtgtaggcgaattggttgaggcgggtcgggcgtttatactgtttcaggacgaaaatccgacctcctgccagctcgattttgcggaccatattacgccggtcgcagtaagtttccaggatgcgatagtcgcccgcagggatttttcggatctcttgctgcaagtatgcgtatgtcggcgacaggacgattttcggattttgaaacatacgtcaaagttcggggtaaagcatcgccggagcaaggcccaaaatgcagtaaagctattcaaaaagtaggatttccgtaaagcgatacaaataacgaagagccgtcaaattttgacggctcttaaatttaagcattggataacagtcccttacaaggcgtttacatgcatctgcaacgaacttttcaggttgccggctttgttcttgtgcacgatattgtgcttggccagcttgtccagcatcgaagtaaccttcgggagaagtgcctcggccgcactcttgtccgtcgtgttgcggagtgctttcacggcgtttcgtgccgtcttgtggaaaagacggttgtgtgcgcgcttggctacagtctgacgaattctcttctcggatgacttatggtttgccataatcgttaatttttatttttaatttttttcgttctttagttttacggcgacatatgttgaaatgacgccttgttcgtgacggccttggccgcctgcggaataggccgaaacccgcttccttcgttgtagtttccccgtcagcgccctgaaaacacaacatacggccttaccggccgtcgttatgcgcttaaaacgctgtcgtgtagcccatagcagagtcgaactgctctttcaagaatgaaaatcttgcgtcctaaccgatagacgaatgggcctcctgtgctatccgttttccctcgatcgggaaacctttagcggtgcaaaggtaaacaaaaaagttttctatgcaaaaaaaatatgggaatatctgctttttttcgatacgcgatatgaaaaaaacaggaatatgccggccgtctatgaattattatataataaggtaagataatatacgactatatgacaccattatccgacgatcgcgggatctaatccgaaggtgtttacttgcgacctgtttccacgtttataatccctttccctcggaaggttgggggcctgcgcttccaaagagggataatcacgcaaggtaagattgatgttgagaacttttttaggccgaaaggagcgtactttgacattgtaagaatggaataacgggagattttaagccggttttttgccgaagagtgaaaaaatatttgcttttcatttttttgtaaggcaaaagttcgtatatttgcactccgaaagagttcggggtgtagctcagcccggtttagagtacgcgtctggggggcgtgtggtcgcaagttcgaatcttgtcaccccgactgatgaaaaggcttggtaatctgatgattgccgagcctttttcgtttatgtgctccgagcggaagtagggggcgctggggacgcgaaaagccaatcgagaagtctgccaaaattcaataaaatgacgattccggctttttatcggggccagttttcaaagcgggcgatatttgtcgtattctttattttcaaagacggttatcgcgaaggtatggggtttattcggggattgtagatccctgtttcggggcttgatgtcttggcagaactccggtatatttcccttttcgggatgtactctgaatgataagtgcgtggtaatttgtgtattataaaaaaagccttccgaagaaggccttttcgggtggaagatggggctcgaacccacgactttcggaaccacaatccgacgctctaaccgactgagctacatccaccatatcggtcgataccgaagatcaaccggagtgcaaagataataggtttttttcgtccgtgcaaaaaaacggcgaaattcttttcggattctgtgcgtacggccctctctggcggtatcgacgaggcggaaacgtacggtgtcaggatgatgtatctgccgttttgtcaaaatgacagtcttgttgcccgatttgtcagacttttctgtcaaaaatcgtttggcatatctcttgttggagttatcgtcgcaaatgcgaagttgaaaaactgttaaatataacttataacaattaaaatcataccactatgaacgtaaaaccattatcagaccgcgtgttgatcctgcccaacccggcggaagagaaaacggccggaggtttgatcattcccgatacggcgaaggagaaaccgctggcaggcaaagtaatcgccgttggtcccggtacttcggaaatcaagatggaagtcaaagtcggcgatcaggtgctttacggcaagtatgccggtcaggagatcaacgtcgatggcacggattacctgattatgaagcagcaggatattctggctatcatttaattagttcggttggattaaaaaaattacgattatggcaaaagagataaaatacaacgtggaagcccgtgagcttctcaaggagggcgtggacgctttgtcgaacgctgtgaaggtaacgctcggtcccaaaggacgcaacgtaatcatcgacaagaagttcggtgctccccaggtgaccaaggacggtgtgaccgtcgccaaggaggtggagctggaggacgcgattcccaacatgggcgcccagatggtcaaggaggtcgcttcgaagaccaacgacgatgccggcgacggcacgacgaccgcaaccgtgctggcgcaggcgatgatcggcgtgggactgaagaacgtgaccgccggagccaatccgatggacctcaaacgcggtatcgacaaggctgtcggtgtggtcgtggattcactcaagaagcagagccagaccgtaggcaccgatttcgcgaagatcgagcaggtcgctacgatttccgccaataacgacggtaccatcggcaagctgatcgccgaggcgatgggcaaggtcaataaggagggtgtcatcaccgtcgaggaggccaagggtaccgaaacccatgtggatgtggtcgagggtatgcagttcgaccgtggctatatctcggcctacttcatcaccgataccgagaagatggaggcgcagttggacaaaccctatatcctgattaccgataagaagatctcgacgatgaaggagctgatgggtgtgctcgagccggtggctcagagcggacgctcgctgctgattatcgccgaagatgtggatggcgaggcactttccgcactggttgtcaataagctgcgcggtacgttgaagatcgccgcttgcaaggctccgggcttcggcgaccgccgcaaggagatgctcgaagatatcgccgtgctgacgggtgccacggtcatttcgaccgacaagggtatgaagatcgaggacgcgaacctctcggtgctgggtacggcggagaaggttacgctcaacaaggagaatacgacgattgtcgatggcgccggttcgaaggacgctatcgctgcccgtgtggcgcagatccgcgccggtatcgaagccgctacgtcggattacgacaaggagaaacttcaggaacgtttggctaaactggccggcggtgtggctgtgctgtacgtcggcgctgcgaccgaggtcgagatgaaagagaagaaagaccgtgtggacgatgcgttggctgcgacccgtgctgccgtcgaggaaggtatcgtgccgggcggcggtgtcgcttacatccgtgcggtggaggctttggagacgctcaagggcgacaacgaagaccagacgaccggtatccagatcgtaaaacgcgctatcgaagagccgctgcgtcagatcgtgacgaatgccggcggcgagggttcggtggttgtcaataaggtgaaggagggcaaaggcgccttcggttacaacgcccgcgacgaccgttatgaggacctgctcaaagcgggtatcatcgacccgaccaaggtttcgcgtgtggcgttggagaatgcggcttcgatcgcttcgatgttccttaccacggagtgtgtattggccgagaagaagtcggacgctcccgcaatgcctgcgatgccgggcggcggcatgggcggtatgatgtagtccatcgcttctcttatgaaaagttcccggaatcgcatttgcgattccgggaacttttttattccgggctgtcgtgtatgaagtccggagagccgttttcagggcggcgggcgttctgcggttcatacgaatacgacgctgcctgctgttggaaagacatacggaaagggctcggggaaattccgatggcttttcatacacgactgatgcggtcgtgatccgtagcttgtctgccggaaaacggagggaatgtggaactttttatttccgggagcgtcagaggccgccgtcggccacccacgaaccggtggggttgtcattgcgcagagcgagcactattttttcgatgcggccgtcggacattttcactcggcagggaacgaatactcccgcgtactgtcccgaacggaaggccggctgggtttcgaggaggcggcagcctgcatatcgttccttcataaggtcgagcggatagaaaacgagtccttcggcgagtatttccgtatcccacgtctgcatggcggcgaagagtgtgcgggccgcctcttccggtgcgatggctgcgaagtgtacgccgccgaccggtttggtgaggtcgatccattcgatgccgtcgtaagcccgaaagagggtatcggacaacggtatgtcgtaaacgatgcgttgcaattcggcgatggttacgggcgttttcccgtcggtctgctcgattttcagcccgataagccgtccggtcgtccgatcgaagcggtattcgcgccgggtgtcggattcgtcgatcgaggtccccgacaggtagtcgttgctgaaatccccttcggccggtgcttcgacggtcagcgtgatcgtttccggtccgacttgcttgctgtaacttgcgttccggcgctcggcgaagttgagctcttcccgcagcagcagggtgtaggggtcgagcagggtggcgaaatcttcgattgcgccgctaccgggacgcatgatgaagcccgagtttatctcaggactccacatcaggatccgttccccgtcgctcagggcgatccgtcctgctttttccagccgccagcggcctgaacccggttccacccacatacggtgggggacaaaggggacttcggcatcgatgtagctgaaattttcctggggaagagtgcggacattcatttcgaggcggaacgaacggcttttgtcgagttgagcggcagcatcgcggaagatacgtcctgcggcgtgggcccgatagcggccgacgggatcgaagacgagcagtacgagggcgatgagggctgcggcgctcaacgtcgcggacagcggccggagccacaatcgccgaggccgtgccggagcggtcgttcgtgcggttgccggcgtattttcggcttgtgcggcggttttcagaatgcgggctttcagaccggccggagcctgcacttcgacgcggggagcgacggcgttgaaggctgctttcgtttggcggtagaattcggcgcaggcgggacatgtttcgaggtgttccaacatttcgcggcgaacctctgcgggggtattgtcatcgaacagcagttcgattcggttttcaaaatcggtgcatttcatggcggatgatttttagtggttgatgagtttgcggagcttgccgatcccgtaacggaaacgggatttgacggtcgcctcggtggtgccggtgatctcggcgatccgggcgaaagtcagggagtcggaggttttcaggcggatcacttcggcctgttcttccgggagggttgcgagcagcccggcgattcgttcgtattcttcgcggagttcctgatcgccggagtcgtccgcaagtgcggcggcccgttcggtcggcagcgtcgcattgcgccggtggcggtggtagtcgcagcagcggttggcgatcgcccgccagaggtagcgctccacgtcgtcgatgcggtcgaggttgcaatccgagtggaagagccgcagcaggacgtcctgcacgatgtcttccgcatcggcctgcgatcccgtgcggatataggcgaagcggtaaagggaatcctgtcgccgatcgacgatccgctcgaggagtttcagtttcgtttcttgcatattctgtctgttttaacgacgcgtctattcataagacgtacccgctgcgaaaaagatttaaccgaagcgtaaaaaacggcgtatgccgatatatttttgtttgccggcgtcggatggaagggtttgctgcggattttgcggaacgggaatttccataaaggatatggcaacccgttacggaaggatttccgatggcgaaatgcctgcactgtaggtttcgacgggaaatccattgcccggctctgcaggtcggtaaagttcgtactctcttgcgtgagagaataatcagctttgtaaaggtattgacagaccgggaatagcggcgtcggatcgttcgattcgtgaaaatgatcgtgtgccgacgtatctgttatttgtccagcaggatacgagcctgtgcgagtgcggcttccgtgatttggctgcccgatagcattttggcgatttcggtaatccgctcctccgggtcgaggcggcggatatgggatccttcggcgtctttgtaaaccacgaagtgagtgtcgcctttcgaagcgacctgcggcaggtgggtgatgtccacgacctgcatggtctgcgagaggtctgcgatgatttcgcccatggcgtcggcgatgcggcccgaatgcaacgtcgaagcaacattcggcttcgcagcgtgttcgggggtgttgtacttataaccctttgatatatatcggctatttatctcgctactctccttccatacatttcgttttatcccccgcaaaagggggcaggccgttttttcgcaagtaagtttttgcccctttgtggttcgcacagggcgggtaagcctatttgcggccggcgacggctgccaccgagagcaggatgccgagcatcaccccgagcaacgccgcgaacagcacctggtattggggggcgagcaggaaggtgatcgtgtgggcgggaatccagaagaacgggattgtcttcttgaatacgaatccccactgcacctcccagttgagcgacgagatgatccgccgcatgggaatcgggcggacgagagcccgcagcgaaccgccgttgttcaggatgtgcgtgtcggtgatcttgtgcagggtcatgaatacgggggcgaaggtggtgttcatggtgaggctgatgagcagtgcgccgatgaatttcagcggggtcagctctcccttcatggctgcggctaccccctcgatgccgaaactctccgccacggccggcacgccgatcgatagcgtcttcatcatagcggcgatccagacgcccaggaagccccacaccacggcgtggggcaggataccgaatcccggctcgttgtagcgaccggtcttgatgcgcaacccgatcacctcgccggcagtcgataggatgccgaatttgagcagggccatcaggtaggggtgagatgcattgcaggccaggtaggctgcgtagagatcgttcgaaaggaagaagggagcgagcagcagtacgacggctccgatgaatgcgaggtctttaagtttcatggattcttttgtgtgacgggtgcttatggtttgagcaggatacgagcctgtgcgagtgcggcttccgtgatttggctgcccgatagcattttggcgatttcggtaatccgctcctccgggtcgaggcggcggatatgggatccttcggcgtctttgtaaaccacgaagtgagtgtcgcctttcgaagcgacctgcggcaggtgggtgatgtccacgacctgcatggtctgcgagaggtcggcgatgatctcgcccatggcgtcggcgatgcggcctgaaacgcccgtgtctatctcgtcgaagatgatcgtcggcagctccatgcggtgagcgagcaacgctttgagagccagcattacgcgtgaaatttcaccgcctgaggcgatgcgttccactttttgaggagcgaaatttccgttggctgtgaacagaaaatctatttcgtcgtcacccgtgggggtcaaggccggtgcgggggtgagctgtacgacgaaacgggcttcgggcatgccgagccgtgcgagggtcgtctgaatcgcatcgttgaacgtcggtgcggccttttcgcgggtggcgtggatgttccgggccagctcttcggccttctcttcggtggcggtcagttcggtcgcaacggcggcgatggcttcgtcgccgtgcgtgatcgcttgcaggcgtgcttcgtaatcggtctgtttggcgaggagttcgccgagatccgcagcacggtgtttctggcagagcgagtagatggtgttgagtcggtcgccgattttttgcagccgttcgggatcggcgtcgagccgttcgctctgtgcggcggccgaggcgccgagatccttcagctcttcgagcacggagcggagccgtccggcggcttccgctgcgaaaggatagccggcttcgaggtggcggcaggccgtttcgctggccttgagttgtaccaacaccccgatttgttcgtcgtccagggcattgcgcagcgccgtgagggtttcgctgatgcggtcggcgttcgaaagaacctccagctcctgttccagttcggtttgttctccttccttcaggtgggccgctgcgagttcttcgacctggtagcggagccactcttcgtccttgcgtccggcttcggcctcttcgcgcagccgtgcgagttcacggcgcaggtggcagagccgttcgtagagggtcgtatattgcatccgcaggtcgtggttttcggcgaccgtatcgacggcctgcgtgcggaaagcctctgatcccaggatcagattctggtgttgggagtggatgtcgatcagttgcgatcccagttcgcgcagcaacgcaaggggaacgggagtgtcgttgatgaacgagcggctcttgccggccggggtgatctggcgcgtgagtgtcgtttcgcggctgtaatccaggtcgtttcggtcgaagaatgcctgcaggtcccttgttccgagatcgaaaacgccttcgatcaggcaattacgtttgtcgtctttcagggtggcgttgtcgttcttgttccccagcaggaggcccagcgcgccgagcaggatcgactttccggcgccggtttcgcccgtgatgatgttcagccggtcgtccagctccagttcgagccggtcgatcagggcgtagttttcgactttcagacgacgtagcatggctatttcagaatggattcgattttgtcggcgatcttctcggccgtttcggctttcgagagcagaggaagctcctcgcgtcctgcgcggtcgatgagcgtcaccttgttggtatcgacgccgaatccggccccggcgtcgcgcagtgagttcagaacgatgaaatcgaagtttttgcgttggagtttcccttcggcattggcctcttcgtgatcggtttcgagggcgaagccgaccaggatccgacccgctttgtgcgctcccagctcggctgcgatgtcgtgcgtgcgtttgaggcggatcgtcagctcgccgtcccctttcttgagtttggtcggggcgacctcttcgggggtatagtccgcgacggcggcgcacataacggctccgtcggctgtggcgaactccctcaccgaagcctcgtacatctcctgtgccgagaggacatcgatacgtcgaactccggtcggggtgggcagcgacgtgcggccgctgatgagtacgacttcggcgccccgccgggcgagcgcttcggcgatggcataccccatcttgcccgtcgagtggttcgagatgaaccgcaccggatcgatggcttcgatggttgcgcctgcggtaacgatcagccgtttacctcgcaggctcttttttttttcggaaagaaggtcttcgacgaatgcgacgatgtcggccggttcggccatgcgtcccttgcccgaaagtccgcttgccagctccccttcggccggttcgacgatccgtacgcctcggctgcgcagaatccgcagattctcctgtgtggccgaatgcgcgaacatgtccaggtccatcgccggggcgaccgctaccgggcagcgggccgaaaggtaggtcgtcagcagcaggttgtcggcgatgccgtgcgccatcttgcccagcgtattggccgtcgcgggggcgatgagcaggcagtccgcccactcgccgagcgagacgtgggagttccactccccgttttccggattgaagaattcgaccaggatgggatgcttcgagagcgtcgccatggtcagcggagtgatgaactgcttggccagcggagtcattacgactttcacctcggcgcctgcgcctttgagcaggcggcagagtatggccgctttgtaggcggcgatgctgcctgtgatgccgagcaggatatgtcgtccttcgagactcataccgcgatgtttaggcttgcggtttgttctccttgtagaagagttcgccgtcgaggaactcctcggtggcgatcagcaccggtttgggcagacgttcgtagtaacgcgagatctcgatctgctcgcggttttcgaaagtttcctccatcgtgtccgtcggcgacgaaaaatccgccagcttgcgcgtgagttcggctttcagttcggtcgaaatctggttggcgcggcgtgcgatgatattgaccgtttcgtaaatgttgccggtttccttatccagatcgaccagtttacgggttacggtgttggtgggagtgcttttcttgatctccatggaattattgtttttctttgttgtttcggtctaaaaagtctttggcgttctgggccagccggtcgagctccttgaggtagtgcgattcgggaaattcggccacgaacgagtagtaggagtcgagcgtcgagaggtagcggtctgcctgcttgtcctgcacggagttgtcggccagcttgctgccggatttgacgatcaggtacatgatctcttcgcggtgggagctggtgggatagagcttcagcgcgttcttgagagctacgatcgccgatttgtaacgtccgattttatagtatgtgtaagcgttcaggtaagttttgtcgtgcagccgctgggtcaggatcttgtccatctcgcggaattcgtcgctgcgggagctgttggggtagtgggccaggtattcattgaccgccacgatagcctgtgtggtcatcgtttggtcgcgggtggggcccggtgccaggtagaagtaactcaaggcgagaattccttcggcatcttcgaggaaaacgctgcgtccgaatttgcggcggaaatcgtcgagcattgacgtggctacctcgtagtcgcgggtcttgaacttgcagaaagcggtcatgaaggcgatactgtcctcctgcatcgttccggagtagtacggtgcggccgcttcgaacagcatcgcggctttcgaccacttctggttctggtaatgtttcagagcggtttggtacatgtggtcgggccgaccgcttttcagaacctgctgtacgctattgcagcccgcagcgaggatcgcaaagcacactgtgcacaagacatatagcctttcttttctcatcgggatcaggtttttccgtaattatccggcgataatcgcacaaagttactctttatttaacgaaatcccaaattttttagtgcgggcgctgcggaatcgatgctatgccgacggttttttgcggaaaaacaacggcgggacgaatcggggtcccgccgtgattttccggttgttccgtcaggcgcggtgtgcgatgagccattcggcgatctgcaccgcgttcagtgcggcacccttgcggatctgatcgccgacgcaccagaacgtgaggccgttgggcgaggtgaggtcgcgtcggatgcgacccacgtacaccgggttccgaccggcagcgaacagcggcatcggatagaccttgtcgcccggagcgtcctgcagcacgacacccggggccgacgcgaaggcgtcgcgtgcctcttcgggcgaaatcgggcgctccgtttccacccagatgctttccgagtgggcccgcatcacgggtacgcgcacgcaggtcgcggaaaccacgatgtccgagtgcatgatcttgcgggtttcgtggtacattttcatctcctccttggtgtagtcgttgtcggtgaagacgtcgatatgaggtatcaggttgtaagccagttgatacgcaaatttttccacacggggttcgccgccttttgccagagccgcgtgctgctcttccagttcggccatcccctgtgcgccggcgccgctggccgactggtaggtggctacgtgcacgcggcggatgtgcgagagtttttcgagcgcgttgagtgccacgaccatttgaatcgtcgtgcagttggggttggcgataatacgccggggggcgttcagggcgtcttcggggtttacttcgggaaccaccaggggaacgtcttcgtccatgcggaaagcgctcgaattgtcgatcatcagcgtgccgtgcttggtgatcgtttcggcgaactccttcgaggtggagccgcccgccgataccagcgcgatgtccacgccgcagaagtcgtcgttgtgggcgagcagccgtacggtgagttccttgccccggaaggggtatttgcgtccggcgctccgctccgaaccgaaaagcagcaattcgtcgatgggcagacggctctcttccagaatgttcataaattcctggccaacggctccgctggccccgacaatggctaatttcatggctttctcaaaggtgttataggttgtattactcaaaaaattcgtcttcttcgtaccgggttgcactgtcgtccgttttctcggtttcgtcgcaatcgtaaaccggcatgacggccggacgcgtgaagagatcctgcttgctgatacccgtcgaagggtcggcgtaaatccggttgaggaattcgcccacgatcggtagggcgattacgctgccttcgccgcgcgataccaggcgcactgcctgatcctcgccgccgacccagcagccggctaccagtttgggaaggacgcacatgaaccatgcgtcgcggttcttctgcgaggtccccgtcttgccgccgacttcgacattctgcatgttgtaggcccatcccaggcgtccgcccgtacccgaacggatcactccttcgagcatcgtgagcatcgtgtaggccgtgtgttcgctgatcgcatcctgcgtccggggggcgaagctggcgatcaggttgccctgacggtcttcgatgcgggtgacgaagatcggagtggtatagacgccttcgttggcgaaggtcgagaaggcgctcaccatttcatagacgttggattccgaggttcccaggcagagcgcaggcacaggatcgatgtagctgtggatgcccatgttgtgaatgaagttggccacggcctgcggctgcttggcctgtttcatgatccacgccgaatagttgttgcggctgcgggccaggccccagctcagggggtgcagctcgccgttctgttcgaccttgccggcctccttgggcgaccagggtaccccgttggcggtttcgatcgtcaccggcaggttcggtacgggcgtgcagggactcagtcccaggtggtcgatggcgaaggtatagacgaagggtttgatcgtcgatccgatctgccgcttgccctgcttggccatgtcgtatttgaagtagcggaagttgggaccgcccacgtaggccttcacgtatcctgagcggggatccatcgccacgaacgaggcgcgcatgatccgcttgtggtggaggatcgagtcccggggcgtgagtaccgtgtcgcgttctcccttgtaggtgaagatcttcatcggacagggcttgtcgaagctcgccaggatggtcttttcgtccacgcctgccttttgcatctggtagtagcggtccgagtaacggatcgcgttgcgcatgatgcgctcacgctcctgtctgtctgcgtcgatgaagagcgttttggtgcgtttgaactgtgcgtccatctggggctggatcaccgactccatctgcttttgaatggcctgctcggcgtattcctgcatccgggagtcgatcgtggtgtagatcttcagaccgtcgcggtagatgtcgtagggcgtgccgtcggctttggtattcttcaggcaccagccgtagatcggattttcgtcgtactccttgaccgcctgttcgtagtcccagtcgttctggaactggcggcgcttgggccgttcggcgttcatcgtcaggcggagcatctcccggaaataggtcgccgggccttcgttgtgcgagaccggcttgtagttgagcaggatcggcagggccgcgatcgaatcccgctggtggcgtgtgatggcgcctgccgatgccatgcggtcgagcaccaggttacggcgtgcgagggcattttccgggttacggcggggggaatacatcgtgggacccttgaccagtcccgccagcagggcggcttcctggatgttgagttcgtggggttccttgttgaagaaggtgtgggccgccgatttgatgccgtaggcgttcgagccgaactccacggtattcaggtacatggcggcgatctcctccttggtgtagttgtattcgagtttcagggccgtgatccactccttgagtttggatacgaccagcttggtcgtgcgggcgatcttgccccggttctcgttgatgtcgcggggaaagaggtttttggctaattgctgggtgatcgtactgccgccgccctgcgaggtgttctgcatcaggacggtcttgacgcctacgcgtaccagcgacatcaggtcgatgcccgagtgtccccggtaacgaacgtcctcggtcgagaccagggccgcgatgatcggcggcacgtcgtatccgtcgagccggagcagctgggcggagtcgagcgggaagagttcgtcgtactgtacgtaggagcggttctgcacgaagaacgtgcccagcaccttgccgtccgaagagagaatctcggtggccaggttgctcttggggttctccagctcctcgaacgacggcagccgcccgaacaggccggcggccgtgagcaacagcaggagcagcaagagtgcgaaaggggcgaatacgatgccccagagccatttgacggatttgggcagcggtttatgcggggtctgttttttcatcggttcaattcaatatgccgcaaagatagtgaaaggtgagggcaattgtgagaacttgttctcgaaaattgccgaaccgcctcctatcttctgcaaagatagtgaaagccgagagaaaacgggagcttgttcccagttttccgaggcgcttcccatcttctggaaagatggcgcaagccgagggcaaggacaaatttattcggttatgcctcggcgaagcctgtctaaatgaaagcattcgctttcgcaaaggtatgaaaaatctcggattatacgttccggttttctgcgggtcgcttgctgattttatcggttctgccgcccggacggatcagaacggcagctccaggccgaagccgaaccagcagctcccctcgctgggcttgtagagcgagagctttacggtcgctgtggcggctgccgacatacgcaggatgttgaggtccagaagcaggtcgccgccgtacgagtaaatgtcgcgccatgttttgccccggctgccgaactcctggaaccgagcgtagtcggccccgacgttcagccggatgcgtttgaagtagatcacgcccgaaattccaccttcgggataacagagcgggaactgataatcaacggagccggccaggtaattattgctcgaaatgtcggacgaggagaagccccggggcagcagccgggtcgatttgtagccgaggaatcgcagacccgacgggaagcggtagccgccgacggaggtttggtaggccgccgctacggagagggagttgtggcggaagaacccgggggtgtagatccgggcgtaggccgatacgaggtcgctgaagttgcggttttcggggttgaggtcgtacccggcccagagcgtataaccccaaggggtcccgacgtcgcggtaggcggcgcgcaccacgtccgagaagccgatgcccagcgagagtttgtggagtccttcgcggtagccgagcgtttgcaggttggcgatgcgtccctctgcgtcgtaacggatcgcatccacgtcggccaccattccgttcgaatactcccagcccgccgagagcgagagctgtcggatatgacgcccccggtcgaaatagaggggcagtgtggcgccggccgccgccgaccaatatttggcatgagccggggccggctggcgctcggccttgccgtcggcaccccgctgggcgatgccgtaggtcatgcggtcgccgccgtaggtggcccgggcttccagtcgtacgccgaggccgctataccggatcgtacctttcagcacatggccgtcggaccggctccagccccacgatgcgaaggcttcggtgctcgacagcagattttgggagagaacggtggcgccccacatgagccgggggttgaactcttcgatggtcttgaacgggtcgaacgatacgggggcccagctgtgcgcccggagcaggtgcaatcccttgcggtagcggcgtgccggatatttgcggtgcagggaggccgagtcggcgggggtatagcgtaccgtgtcgagattgaccacgttccagcggcggcggggcggattgaccagatcgacgggcagttgcgacggggcgaccggaatcggttcgatgttttcctgacgggtgatgcggtagccctttcggtcgtaggtggtcgtccagacggctccgctgtcggcgggagccggggcgaagctgccgtaggtcgaagtcgaaagacggtattcgcgcccttcgccgaggtcgaagcagtgggcttcatcgcggcccgaggcgatcgagccgtagtagagcttgccgtcggcggcccgcaggtcgctcagcgtgatgtaggcgcctcgggtgacagcctgcaagccctcgccgggttcgatccggccgatccacatgcccgaattgtcggtgacgagcgtgtagagccgttcggtcgcattgtcccaggccagtccgtgcacttcggagaagcccggcatgggccaggcggtgcgctgccgcagtgaatcttcggcgacgatcgtgtagtgtccgtcgggcgtatattccacccaggccagggcgccgcttcgcccgatcggggtcgggtagaggacattgcgcagtttcggtgcgttgcgggggcgtttttttccgggggcgaggacgacgagccgggaattgacccgctcggggaagagcagcgaacgccggtattcggtccaccagacccgttgtccgtcggttgtggggcggctcgagacgagtcctgtccaggtgcgccgcctctcgcgtcccgttcgggaatcgaccgcaacgagccgcgaagggcggtcgaagtccgttttcagcgctacgagcgtcgtgtcgttcagggacacgggatgagtataggtggtgtagtttttctccggcagcggcgtgagggtacggcccgaatccgtgaccttcggcagcgaatcccagaaacggttcaggtcggcgaaggcgtcccggaagaggatgccctcgcccgtgccgtagaatttgcgcaaggcgacgctggtgctgaaggtcagcatgtaggcgttgcggacgccgtagcgcagggtcttgtcccagattccgtccccatagcggtcgtagccgtaggcgaccatctgatagcccatttggtagtggtcgggaacgaaatcgcggaaggagccgcagaaccacttgtcgcagttgcgcctgcggagcacctcgtaacccagggcacgatattcgatggtgaagcgcggctggcggccccggccgtaggaggacatctcggtttcgttcatcaccgcatcgccttcgagcgcccagaggggcatgaaaagcagtccgacggtcgatccctgctgcccgatcaggtaactcaggatgcggatcaacccccggttgaggttgttgtactgaacggcgtggcggtattcgtgggctacgagctgcttgacccagggcatcgagtagctatcgacggagggcgtggtgagaaattcgatgcgtttgggcatccacatcaccagaccgttggactggaaattttcggtatgcagcacgaaagggattttcagcggcgggtggctgaaaccgtgtgtaatcgtggggcgtaccgcctggatataatacagggttcggtgcgccagcgccgatgccgtgtcgggaaagacgacccgtacgtcctcggtgcgcaggtgtttccagcgcagcgcagccgcatccgcaccccacgaatagtattgggcgcgaacggattttcctccgatgaagaggaatcccagcaggaacagaatcgctgcgaaacggcgcatgggagcaggccgggtcatccgccggcctttttgcatttgtaacccgctttggcgaggatttcgaccacccggtcgcggtggtcgccctggatgatgatttcgccgtccttggctgccccgcccacgccgcagcgggttttgagcaggcgggccagttcccccaggtcggcatccgagccgacgaaacctttgacgagcgtgacggtcttgccgccccgctgcttgcggtcgagccagacgcgcaggtcctgtcgttcgggggcgagggtttcgatctgcggagcctcctcggtgtcgtatttgaaattcgggttggtcgaatagaccattcccaatctcgctttccagtcgttcgtcatgtgtgaaatatgcggtcgttgttctttttgccggaaaagctggcacttttgcaacgaaatatttttgcaaatatagtgtaagccgggggctgcgccaaatttatttgagtcaggacgggcgccgtttgttttaggtgtcgccgtatcgatcgtccggaatgtcggggtgattgggtgggcgcagaaaaaactctttcaatcatatttcggcgactgttaaggagtttgcgcttattgccgccggtgcacggataaaatgaaaaaaccgtctatcttgttgatacacggttttcaatttttcaggtagctccgtttgcagaacttggtgggagctgagggattcgaacccccgaccctctgcttgtaaggcagacgctctgaaccagctgagctaagctcccgaaaggcaagaagccttcttaagcgcctgaacaaggacttgaacctaggaccccatgattaacagtcatgtgctctaaccaactgagctattcaggctttttcgaaaacccgggtttacccctgttttcggagtgcaaatatatagcatttttttattcctgcaaaatttgtcccgttttttttgcaaaaacctcgtatctttacgaagaattaatcgtattacgagatgtttcgaaaaacctaccaactgacttttgtgctgattttgaacgctttgtcgtgcctggcccaatccgggctggtattcgaccggcccgcgtgggatttcggcaccatccgcgaaaccgacggcccggttacgcatcgtttcgtctgccgcaacgaaggggaacaccccgaagtgatcctccaggtcactacgacctgcggttgcaccacaccccgatatacgcgtaaaccgattctcccgggcgaggaggctgaaatcacggtaacttacgatcctgccaaccgccccggcaacttttcgcggaaattggccgtctttacggccgaccgccgcatcgccgccaaactgcgcattacgggttccgtcatcggtcgtccgaagacccccgaagagctctatcccatcgactgcggcgacggactgcgactcgaagacaattttcacgctttcacctatatttataacggccgaacttcggtcgctaccatcggatatgccaacctttcggacaaacccctgactttggagctgcgtcccgaagaggcgagcggacttcttcaggcggactatccccgccggatcgctccgaacgaacgaggagtccttaccttcagctacgacctgccggcggacaatccccgttacggcacgttgaaagagttgctcacggtttgtatcgacggtcgtcctacacggaccgacatctttctgcacggctttgccgtggacgatccccgccgggtggaacaagaaaacgccccaaagtggcaagtgaacaaaaatattattaattttggccccgtgaaacggacaggagctccggcagagcgatctctgacacttggtaattacggcaaatcgaccctgataatccgggccgtagaaactccgaaaggtgtcggatgttcgcttcgcggcggagagcggatcgaacccggccaggcgtgcgaaatcgtggtgacattcgatgcgtcgcggcgggattacggtctttggtcggagcgattgatacttatcgccaacgaccccgcgcgtccgatgcagagcatccgcctgacggccgctgtcgaagagtaaggtacgaagagacccggccgaaacaggaggccggacggaaaaagacgggaactccgacattttccggcagacaggcgcggtaccgacctgtacggacggagccgagcggagagaacggaaacaaatagaaccttttataaaaaagtaatgtacacaatccttgaaaaaagagtgctcgcggagaacatttatttgatgcgcattcatgcgccccgcgtagcacgagcggcaaaacccggacagttcatcatcgttcgcatcgacgaattcggcgaacgagtacccctgaccatctccgattacgacgccgagcaaggctcggtaacgatcgtcacgcaggctatcggagcctcgacccgcaagctctgcgccctggagcagggcgatgcgctggccgatttcgtcggtccgctggggcacccctcggagttcattcacgaagatctcgacaccctgcgcaagaaacgcttcctgtttgtagcgggcggcgtgggtacggctccggtctatccgcaggtaaaatggcttcacgaacacggggtgaaagcggatgtcatcatcggtgccaagaccaagtcgatgctgatctataccgaggagatggcccgtgtagcggacaatctctacatcgctaccgacgacggcagcgaaggcttcaaaggtatggtaacggccctgatcaaagacctgatcgacaaccggggcaagcagtacgacgtctgcgtggccatcggtccgatgattatgatgaagttcgtgacgctcacgaccaaggagtactccctgccgacggtcgtatcgctcaatacgctgatggtcgatggtacgggcatgtgcggcgcctgccgcgtcacggtgggcggcaagaccgtcttcacctgtgtcgatggccccgaattcgacgggttccaggtcgatttcgacgaagcgatgcgccgtcagggtatgtaccgcacgcaggaagagcgtgcccgcgccatcgagcaggagcgcgagaacggtcacaaatgccgtgtcgggctcgacaaataactaccgatccacacacaaccggacgtttccggcagacgagtatggagcgatgctctgcgtccgaatgccgaaggcgtccacagaacaatgaaagcaaacaactatggcaaataaaattccgcgcgttcccgtgcgcgaacaagatccgaaagtccgggccaccaacttcgaggaggtgtgctacggttataatgtcgaggaagccacgctcgaagcgtcccgctgcctgaattgcaagaatccccgctgcgtggcggcgtgtccggtgaatatccgtattccggatttcatccatcaggtcgtggagggtaatttcgctgcggctgccgccgttatctccgaggacagctcgctgccgagcgtttgcggccgcgtctgcccgcaggagagccagtgcgaaggctcctgcgttttgggagtcaagggcgagccggtggctatcggcaagctggagcgcttcgtcggcgactggaaaatcgagaatgccgacaagatgcccgctcccgacatcaagcgcaacggacacaaggtagcggtcatcggcagcggtccttcgggactggcctgcgcgagcgacctggcccgcatggggtatgaagtgaagattttcgaagcgctgcacaaggtcggcggcgtattggtgtacggtattcccgaattccgtcttcccaaggagaagatcgtagccagggaggtcgaggccgtgaagaagctgggtgtagagatcgaaaccgacgtgatcgtcggccgcaccgtgaccatcgacgaactgatgaacgaagagggttacgaggccgtcttcatcggttcgggtgccggcctgccccgtttcatgggcatcccgggcgaaaacctgaacggcgtggtttcggccaacgagttcctcacgcgtaccaacctgatgaaggcttacgatacgcattacgatacaccgatctatgtcggtcagcgcgtagtggtggtcggcggcggtaacgtggcgatggatgccgtacgtacggctaagcgcctgggggccgaagcgaccatcgtatatcgccgcagcgagaaggagctgcccgcccgcgtggaggaggtccaccacgccaaggaggaggggatcgaattccgcatgctgaccaatccgacttcgatcatcggcgacgagaagggctgggtcgtaggtatcagttgcgtcgagatggagttgggcgagcccgacgaaagcggacgccgctctccgatcgagaaggccggttcggatttcgaaattccgtgcgacgtggtgattatggcgctcggcacttcgccgaacccgctgctcaagatgaccaccgaaggtttggaaaccaaccgcaaggggtgtctggtggccgacgaaaagggtgcgactacccgtgaagggatcttcgccggcggcgatgccgtaaccggagccgcgacggtcatcctggccatgggcgccggccgtaaagccgccaagtccatcgacgaatacatccgtcaaaaaaagcattaaacgcttgcaagatatgaggaaattttgtttcgccgcattcgctgctgtgctcatcgggacgacggcttgtacacccaaagctccggagcaattcacgggtaagatcgtcgatggaacgatgaataccgtcacggtagagtccccggccgacggaagaagggtgactttcaccacggaggatgccgatatgcaggaggcttacggcctgctgctgggcaatacagcgaccgttacctaccgggggaagctcggcgagacgactccggctttgaaggtggtgaccgatcccgcctatgttacggccatcggccgctgggtggagcccaatccgatcgcccccgagcaggaacaaggcattgaaattcgagtaaacggcgtcgccgcttcgatcaatatgctgactctgcgctacgaagcttgggaattggcgcccgaaggagatcgaattatcttgagcggcgtatcggaaggaagcggcgggccgtatcctttcgagcaaacggctgaaattatcgagatggacggcaagccggccctcaagatcgatgcggtcgttctgaccaaaaaagatctgatctaaattggatgccgtttcatatacggcttggttcgataaaaaaactcacgcttgaaaagcgtgagtttttttatcgggtgccggaaatcgggattcggaaccaaacaacggaacttcgtcgggaaggagtgcggaaacaggcaaaaaatgggagcaaagggaatcgacgaaacgataagccgaaattactccgttttaccgaccaaccgctcgacccggtcgaggatcatctgcggttctatgctccagatacagcggtaatcgccgtatttacagggtttctttccatatacggagcaaggccggcaagcgaaatcggtctgcaagacaccttcctgtccgaacccgtaacccagaaagccgagcccgggatgggtcgctccccacaccgacacggtgggcgtagccatgagcgaagccagatgcatcaccagcgaatccatcgacaccacgcaatccaggttggaaatgaggttcatctcatcccccagctttatcttgccatacaatgccgtgacattcggatagagcgcctccatgcggcgggcgaattcggcttcctctccaccgccgctgtggacgaaaacccggtcgaaacgcccgctcaacagacggacggcttcggcgctcaacttttcgggataagtcttgcccggctgggcggagaacggcgcgaaaccgatccatacaccccgtttctctcccatgggattgggtcgggggcgtttctcggccggccggggatcgggaaagtcgaatcccaggcgacggaagacgtcacaatagcggataacggtgtgtttcaaaggtttcacaccttccgaaccgcgtcccagccgcatgtatttctcgatccgtcccttgtgaattaccgaaacggggatcccccgcaggtggagtgccgcacgcaccatcttcgaacgcagtacgttgtgcatgtcggccaccgcgtcgatcttcagctcggccgcttcgcgggcgaaccgaatggcgccccggataccccggtgcgtgcggcgggtttcgatatccaaaaaaccgacatccagcccttcgaaaaagggatggaacagcgatttggtcgcaacggtcaccttcacctcgggatacgcctccttcagggcgcggagcgcatggggcaacatcgccacatcgcccatcgccgaagtacggatcacgagcaggtgccggggcagctttttattttttcgcggcataaagcacgggattgagcgccggatcgttatacatcttcatctgtttgtaggtcttcatgtatttacgtccggcttcaatatcctcgatcaactcctcgatcgcagtcgaaagatcgacctgctgcgacagcagcacatcgagtttttgctggcaggcagcacggtgcgcctcatccacatccttgcggagcacttcctgacgcatgtggtaaatcttcagggccaggatcgagaggcggtcgatggcccaggccggggtttcggtattgatacgcgcccccgactgcacatctatattcttatacttatcgagcaggtaggagtcgatgtactccaccatgtcggtgcggacctggttcgatttgtcgatgcggcgcttgatcttcagcgcctcgaccggatcgatctggggatcacggataatgtcttccagatgccactgcaccgtatccacccagttcttcatatagagcaagtggtcgatcgttccctccgcatagggattcgaaggctgatgatccacgtcatcgtagcgatggtaatcgtcgatcacctgatcgaatattttgttcgcattttgagtaaacatagtctatccttattattttgtaattatccgaggaaacgattatctttgcaaaagataggatatattccggaccggcccaacaagttcggctgccgcccggtctttcttttcatacaaagatcaaacaaagataatgaatttttatcacaaagcaatatccctcgcgggtttcgtattactgaccgtcctccccgtgcaggcccaagtgcggcaaacgcgggaagaatacataaacaagtacaaaaaaatagccgtcgcccacatggaacgctacgggattcccgccagcatcaccatggcccagggcatcctggagtccgattgcggcaacagttggctgtcgcaggcttcgaacaaccatttcggaatcaagtgcaagcgcaactggacgggcgacgtggtctattacgacgacgatgaaaagggcgaatgtttccgcagctatccttcggttgaggcatcctatcaggatcatgccgaatttctcgacagccagccgcgctacgactcgctcttttcctatgcccccaacgactataaaagctgggcccgggggctgaaggccgccggttacgctacggctccggactatgcgcagcgactcatccgcatcatcgaagagagtaaactctacctgctcgaccgcgaggacggacttaccatttacggagcgcaaaccggacacctcaccgacgactggttctcggggcaaagcaacgtcgatcaagccgcagcaatcgcttcgggggcagtcgatcccgacgactaccgcgtgacggtcaatgcccataagggttacaacgtctatcgtaccaacggcgtgaactacatcctggctcacgacggagataccttcgagaaaatttcccgcgacttccgcatttcggcccgcaacctgcgtaaattcaacgatgtaagcaaaaatgcacagcccgttgccaacgaagtgatctacatcggccgcaagaagaagcgctgggacggcaacgttctgctgcacaccgtgcgggagggagaaaccctctggtcgctcggacagtcctacggcatccgcaccaaatcgctggcacgtctgaacaaactcaaggaaggcgatgcgctgactcccggtacaacgatcaagatacgataatcaatccttcgatatagcatggaaagcatacccctgcgaaagaaaattctcgaaaccatcgtgagcaaatcgacgctcaaacagaaggttttcgacaacacgttcgccacattcaacgacctgaaagaaaccctgctggagatggcttccgaaatggacgaccagttggacgggcttctcgaccggcgcgtgcggctcgaataccgcgaccggggcaagttcgaagcccagatacaggtggccaacgacctgctgatcttccagatgcacaccgacgtcttcgagttcgagccgaaccacgtcatctggcaaaatccctacgtgcagacggatcgggacaactcctactgcggcgtaatcaacatctacaacttcctttcggactcgttcaagttcaaccgcaatgccgatgaaggctacctcatcggccgcattttcatcaaccgtgaaaagtgctacttcgtcgaagggaaacaacagacctcgatgcgccccatgcaattcggcaaagcggagatcgattccgaggcgctggtccgcattctcgaatcggcgatctattatgccctcaatttcgacctgctgctgccctcctacgacgacaacaagcgcgtgacggtcgatcagttcaataccaaactcgataattcgaaattcgtaaccggcaaacgcctgggatacgatttcgatgtggacgacatttagaatcagaaacagatatagagaaccatgctgaaaaaattactcctgctgacccttctcggcactgctttcgccgcacaagcggaagccgccgctccctccacttaccgcgacatcgcccggctccgtgcgatgaaccagcgggcgcagggcatccgtcccgcagccgacggaaaatcctatacgactcttcgcggcaacgccatcgagcgtcacagctacacgaaggacgctcccggcgagctgctgttcgaatggaagaacgacaaagaaaaccgcgatatcgccgactatcagttttcacccgacggaaaactgctgctgctctcgatcggctccgaaccgatctaccggcactcctataccaccgattactacctgaaaggcgccgacggcctgcgccccattctgaccgatctgcccggcacgcgcgacgcttcgttctcgcccgacggacggacgatcgccttctcgagcggcaacaacctctacctctacgacatcgtcggggattccgtgcgtccgatcacgacagacggtgcatggaaccggattatcaacggtacgaccgactgggtatatgaagaggagtgcgccttcacgaaggcttacgctttttcgcccgacggacagaagatcgcctacctgcgtttcgacgaatcccgtgtacccgttttcgagatgatgcgttacgacggcaagctctataacgaagcctactcgttcaaataccccaaggcgggcgatgccaattcggtggtcgatctctacgtttacgaccttaaaacgggcgaaacggagcgtgtcgatgtcggtcccgaccggggacagtacatccttcaaccggaatggacgcccgacggacggctctgttttcagcggatgaaccgtcgtcagaaccatttcgaagcggtactgtgcaatccggacggtacgcagcaggtgatctacgacgaacgctcgcccaaatacgtcgatcacctcaacaagactttttatttcctggaagacggacgccgtttcatcgttcgggaggagacctcgacgggttatatgcacctctacctgtacggcatcggccaaggtgtgcttcaccccattacgcagggtgagtgggaagttaccgatttcgtcggactgcgcagcgacaaggtttactacatctcgaccgaaagttcgcccctgaaacgcgacctctaccgaatcggactcgacggcaagcacaaggagcgcctcactcccggcgacggttactattcgatctatcccagcgccgacctgtcctactacatctgcgaaggcggcggcagctccgcccccggccgtaccgacgttttcaacgccgccggcaaacgggtgcgcacgctctatgacaacgcaccgctgaaggaagcgctcgcggaggcggggcttcccgtccgggagttcttcaccttcaccaccgagcggggcgacgagctgaacggttacatgctcaagccgctcgacttcgacccggcaaaatgctaccccgtgctgctgacccagtattccggtccgggatcgcagcaggttgccgaagtgtggggtcccgactgggaggacgcgctcgtcacgcatggctatatcgtcgtgtgcgtcgatccccgaggcaccggataccggggcgaagagttcaagaaactcacttacggcgacctcggccggctggaggtcgaagaccagatttcgaccgcccgctacatggcccgtcagagctgggtcgatccagcgcgaatcggcatctacggctggtcgtacggaggtttcatggccctaggatgcgctttcaggggcgaaggccttttcaaaatggcgatcgccgtagctcccgtcacttcgtggcgctactacgattcgatctatacggaaaatttcaacggtcttcccgaagaccatccgaagggatacgacgacaattcgcccgtcaatctcgcgcacctgttccgcgacgacagcacgcgtctgctgatcgttcatggtacggcggacgacaacgtccatttccagaacacgatggagatggtccgtgcattgaacaagctcgggaagcagtacgacatgatggtctatcccgaccagaaccattcgatgatgcccgacgatatgatacacgtccgcgagaaaatgctccgttatacgttggaaaatttgtaaccggcaaaataccgtgaaaaatctgctgctgcatcccacaccgatcggaacggtcggaatcgtcgagaacggtcgggccatcaccgacattctcttcgaagaacaactccccgggcatgccgtccggcatacgaccctcttgctcgagcgggcggcgaaacagttggatgaatatttcgccggaaaacgcacctctttcgatctgccgcttgaaccggagggaaccccttatcggaagaaagtttggcaggtcctcacggaaattccttatggacaaaccatgacttacggcgaaatcgcccgtcggacaggtaatccgcaggcttcgcgggccgtaggcggtgccaaccatcacaatccgattccgatcgtcattccctgccatcgggtcatcggtgcgggcggcaagctgaccggttacgccggcggtctgccgcgcaaagagttcctgctcgccctcgaaaggaacaggctgccgaaataaaaaacgaaggccggagtgaaaactccggcctttttcgcaggctctgctccgcatcacgcaggctcgaacatatctttgcctacgccgcaaagcgggcagctccaatcgtcgggcagatcttcgaaagcggtgccgggagcgatgccgctgtccggatcaccgaccgcagggtcatagatgtagtcacaaactgtgcaacgatactttttcatagtccgaaaatatttagattaagtgaaactgtatttttacaaatataatacctcttccgggattcctcgtgtttttccccgaaaatttacgataattctgtatataccggataaaatcgctccgtaggcatcgaagccgggtactacgccgcagctgtcgggccgaacaatcctccgcaggaggcaagacagctccgaaaggaagacgacaaaaaacgccgccgcaatctatgtgcgacggcgtaatattcgttctttccacccgggcagaagaagcccggttcgaacggaagtctttatttgatgcgctcgtaatattcgcgggtacgcgtatcgacgcggatcttgtcgccggtattgatgaacaggggaaccttgatcgtcgcacccgtattcaccgttgcgggtttgagcgagttggtcgaggcggtatcgcctttgatgcccggttcggtataggtcacttccatatcgacgatcgggggcagctcggcggaaagaacgctctccttctcggtgtggaacatcacctcgacgatctgaccgtcggccatcaggtcgtaattgtcgatcaggttcttgtcgatgttgatctcctcgaaagtttccgtatgcatgaagtgcgcacccagatcgtcttcgtaggtgaactgatagggacggcgctccacacgcaccggctcgatcttcgcaccggcggagaaggtattctccagcacgcggccgttttccaggtttttgagtttggtacgcacgaaagcggggcccttgcccggtttcacgtgctgaaaatctacgatctggaaggtcttgccgtccaattcgatgcacatgccgatcttgatgtctgctgtagttgccataggaatatttttatttacgatttttcgcggaggcaaagttacgaaaaatctgcgtaaatcgggcaacgtcggcttatttttccgaatccgaatcgtttcgtcccgccgatcgtccctcgccggtccatcggtagcgcggtccggaaatacctaaaagagccgtgacccgctcggccaccgaccggcacaactcctctacggacgaggggcgggcgtaaaatccgggggaagcgggcaacacgacggcgccggcttcggtaagagcggtcatgttgcgcaggtgaatcagcgagaggggcgtttctcgcacgaccagcaccaggcggcggcgctccttgagcatcacgtccgcagcccgttcgatcaagctttgcgaaacgccgcaggcgatgcgtcccagggttccgaccgaacaaggaacgaccgccatcgcgtcgtaatcggccgaaccgctggccggaggagcgaacaaatcgtcgttgtcgaaaatgcggatgcgaggatcttctggcatagtaactccttcgaaatcagccacttcactggcatgagtgctgtaaacgagcgcgatttcggaaacctcttcggcccggagcagttgctcgaggcaaaggcgggcatacagagcgccgctggcggctgtgacggcgacgacgattttcatagagttacaattcgatggttttgcatttgagccccaacttccggatcttgtccaacgtgcggggcaaggcataacgcatgttccggaacgatttttcgctgtcgtggaaaaccacgatagctcccggttcgaggtgtttggttacgttcttcaggcatttgcggggcgagagcgaccggctgtaatcgcgcgaaagcacgtcccacatcaccagcttgtagcgctgcgacaacgcccgggcctgcgccggcgtgatccgggcgtagggtggtcggaacagttcgctgtgaatcaaatcgttggcgaaatcgacatcctcgatgtagcgttccaggctcatcccccagcctttctggtgggagtaggtatggttaccgaccttgtggcccgcgtccacgatgcggcggaaaagatcgggataagcctccacgtttttgcccagaacgaaaaacgtcgccttggcgtcgtacttctccagcatcgccagaatccactccgtgatgcccggtgtggggccgtcgtcgaaggtcaggaaaaccccctccgggtcgtcgatctcccagatcagcgacgggaacaggtgacggattattttgggcggcttgagtttcatgacgagaaaaaatactccggcggagtacggcatcgacaaagatagtacaaaatcgccgattttcaacagacgatcttccggtgcgttcgctttataggcaaaatgaaaaatatgaattcctcctttgcggaatatgccgctgattctcgaaacccccgacgaattgcgttgggcggaggagatcgcggaattaaaacggttttgggaagaatagtcgaacggttgcgattcgcttcccgtcgaaacggctgtttcggcgggaactttcgtgcgaaaatatttgcaggatttgatcgagttatctatctttgagaaaaatacgctactgtagtttgtctgcaaaaacgttatgcctatgaagaaatcgtactttttgttgcttgcagtcctgttgtggggttgctcgacgttcgaagaggaggttcttccggccccgggggattctccgcgtcagttgtcggtttcggcggtggaagagcctggtcccgatccgggttcgttggagatcatgcagcgtgcggtggacagcgttgctgcccatagcgggcagcgcagccgttctgcctcggtatcgggtgctcagatcgaacctacccaccgttacgtacgtttctctccggccacgaaagcgcagttcgacgctttgttcgatcaggatgaatttacctgttataactttccgttggatgaggtttctccggtaagtgcggatgagggcttccggatgtccggaccttcggatactccggaacagctctacgcggtacttcgtacgacggtcgtcttgcccgatacgattgcgagcgaggttttgaaagagttgtacgacccgtcggttacggagcggggcgttgcggatccagtgtgggcggatcgggtctgggccgaggctcgtgctttgatcgacgacgggcgccatccggggaaaataattccttacattccttccggagagattaaggtttgggacaatattgccggagattacattccgatcgagggtgttatggttactatcatgcctcctgataacttgttgagggtcttgacaacgaggacagataaggatggtaaattcagaatgtcggggtcggttcaggagccagttaattatgcgctttcgtggaatacggtgtattggacgatcaagagcagcgccgtgagttcggcgaacttgcggggtcccagcgtgcagggcgcctggaatgtgaagatttccggagatgatgttattagtggtcctgcgacggtttttcgggccgcttaccgatactggcacaagatgccggcattgggattgaccgcacccaatttgggtaggaaagtgagaattacatgccataattcggtaggtttcacatattattggaatggaaaagagttaagtgcttccggcctatttcatcctgtcgtaaatagtgatgctgatcctgatatagaagtggcctgtaagagaaatgccagctatgttttcggaactgtagctcatgagattgggcatgcggcccattatgctttcaatccgaaatttaatggaaagacgaatgccttgattaaggagagttgggcacaatttacccgctacattttaacggaaacggaatacaaggatttgggcctatatggtaaattgcataaaagtcgattatttaatccgaatcagcatttggtggcatttcaggttccggattattataatcagcaaatgtggtacttgggattaggggctgaaagagatgagactgtgcgattgtacactcccatgtttgtagatttatacgatacattcaatcaaaataaatggtatggatattggtctcccggcagaacaaaagatgatttggacaggaccccggatgatgatatttgcatgctgactattcgggaaatccaagagattgcttttggatcgaaaaacaaatcggaggctatcggatggattcggcagtacgccgcccgatacggttttacttcggaggaaatcgatcggtactgggcggtttactctttaatcgaggatgaagattatgatcggtataaatagtatgaataattattgaaaaaacattggattatgaaaaatttgatatggatattggcggcgattatgcttgcaggctgtggtgacaacgaagagggtcaggatatggggctgcatggcgatcctcccggatatagcctttttatttggtcgaatgagagtgatcaccggataacgatgacggtaaccgatcgattcgagaagaaagagatccttcccggagaaagcctgttgcaggaggaggtcggtttcgttacccctccgagccttgaaggatatatgatagacggtgtttcgattgtgttcgacgatggcccgtacgggggtgtatttttcaggacagataaggttacggcgtttaatccctgtcttgaatgtaattatacggtggaacggtcgaatatcgatggttatattggattttgcaggtggacctataccttcaccaacgccgactacgatgcggccgtggctcgcgggccgatgaaggagcagtaaccatacgggagcgacttgtttgcaggcacgaaacccggccggggaatatttcccggccgggtttttgcaggaaactctgccgaagccgtttgcattctcgaaaaatatccctacatttgtagtaaacagattaaccggaccggactatgaaaaaattatcgtatctgctgacattgctgctgctcgttaccctcatgacgggctgcaaagcgttccatactctgatggattcgaaactcaaagccgctcagggggcaccgtacgaattgattgtcgtgtgcaaccaacagttgtgggagagcgagttgggtgatacgctgcgttcggtgctgttggctccgattccctatctgaacgaacgggaacctctgttcaacgtgatgcagtttccggaatcgggattcaaaggtacggtcgtcgattaccgcaatatcctcaaagtgctcgtcgatccctcccttgcggcggcttcggccggtgtgcaatacgatgtcacggcttctccgcaggtcgtggtgacgcttcagggaccgacccgggaggcacttacgcaatatgtcgcggagcatcgtgcggagttggtgcaaaccttcgaaggggccgagcgcgaccgctcgatcgctttcgccaacaagttcaatcagacggaatccggcaagctcgttcgagaaaagttcggcgtggagatgaagattcccaaaggctacatcctggcccaacaaagcgatgatttcctctggttccggtacgaattcccggctgcgagccagggcttcatgctctattcctatccttacgaagggaagcagtccctttcggaggaggcgttgctggctgcccgcaaccgtttcgccgcccgcattccggggccgagcgacggctcctatatgaccacatcgaaagtctttacgccccggtatcggtttttccggctcgaaggcagagcctgggtcgaaatgcgcggattctgggatgtcgaaggggatttcatgggaggtccgttcgtaagctatacgaccgtcgatacggcgaccgaccgggttttcacgctggattgctatgtttattctccgaaacttcccaaacgcaattatatgcgcgaagtggaacacttgcttcatctggtgaaattccccgcagcgaccggttccgcatctgcgactgtcaccgctggcaggcgggaggcggcaaaatcagatgctccggcatcccgggacgcaaatccgaaccccgaagcaatctcgtcggaatcctgataatccgccgccccggtgttgcaattcctgacatatctgttcatcgccatctatacggcgacggttatcggcatcatcctggttgtcattttgggcaaccgcaacccgctcaagacgatcccgtgggtcgtcgtgctgattttcgctccggtcgtgggattggttttctatttcttcttcgggcaggatctgcggcgcaagcggattatttcgcgccgtacctacaagcggctcatggtctatgctcttccggcccatgtgcgtcgaagcgatgcccccgttccggccgcatgtcaatccctgtccactctgcttaccaatacttcgcaggcggtttccttttacggcagccgcctgacccattacggcgacggggcttccaagatgaccgccctgctcgaagagatcgaaaaggcccgcgaccatattcacattctctattatattttttgtgacgatgaaacgggtgcccgtcttcagcaggcgctgatccgcaaggcaaaggagggtgtcaaagtccgcgtactctatgacgacgtaggctgcaacggggtcaagaaagaatttttccagcagatgcgcgatgcgggtgcggaggttcatgccctgctgcatgtacgctttccgatgctgaccgaccgggtcaattaccgcaaccaccgcaagatcgtggtcatcgacggccgggtaggttttttcggcggtatgaatatcgccgaccgctatgtgaaaggaccgggttggggggtatggcgggacagccacttcaaggtagaaggaaagggggtgtatggcctgcaatccgcatttctggtggattggtcgaccgtcgaacgcgtacacctggatacctcgaagttttttcccgaagccgacaactatacctcatcgaccatgcaattcgctaccagcggtccgttggggccctggcgaacgttgttgcagggtattatgacggctatcgccggtgcgcgacggagtatctgcatccagacgccctatttcctgccgaccgagggcctgaactccctgttgcaaacggcggcattgggcggtattgacgtacaattgatgctgcccgagcgttccgattcccggattatcgataaagccgtgcattcgttcatcgacgatatgctccgggccggggtgaaggtttacttttataccaaaggcttcctgcatgccaaaatgcttatcgtcgatgatctgctgacggttgtgggttctgcgaacatggatttccgcagtttcgagcacaacttcgaaatcaacgcgttcgtttacggacaggatttcaatacggcaatgcgtcgtgttttcgacgaagacctgcgctcgtgccggcggcttattccttcggaatggttgcggcgacctcttccgcagcgattgagcgagtcgttcatgcggctcttttccccgctgttgtaaggccggaggaggcgatgacggcgatcggggtttccgttgttgtccgattcgcaaaaaacatagccacaccacggaaagcccggagcctgtaaaaaatatttggagaatccgatttaactttctatctttgtaaaacaaacgtatcagggttctgaccttcacgggtcgggattcttatttttttgataaaaccatggcaaaagagattatttatctgacggcagagggttacaagaagctcaaggacgaactcgaccatatgcgctcggtggagcgtccggctatatcggcggccattgccgaagcacgcgacaagggagacctgtcggaaaacgccgaatacgacgcggcccgggaagcacagggactgctcgaaatgcgtatcgccaaaatggaagataccattgccaatgcgcgtatcatcgacgaatcgaaagtcgataagagcaaggtgcagatcttgagtcgggtaactcttctgaaccacaataccggcaaggaggtgatctatactatcgtcgccgagcacgaagccaacctgcgcgaaggcaagctggccatcggcactcccattgccaaagccctgctgggacataagaaaggggaccgggtggacgtgaccgtgcctgccgggacgatccatttcgaaattctggatatcaacatctgaaatagggagatcggggtgaggcaatctttttaggatgtagaaactgttgttgattattttttggtaaggaatgctttcgggcgttccttttttgttcgtatttgtatgattccggtgctttgtcagtcgataccggcgattgctgctatgtacggcggattgcatgcaaggggagttcggtgccatgatcgcgcaataaacggaacgtccgaccttaaggtcggacgttctctgttttctcgttttggaggagctattttaacgatgtgcgaattttgcctgtcgcatatccataagattgatatttgacaggccaccaccgatgagttctccggcggggcttgcaccctctttggtcagatttaccatttggcggataacgggtccatagttgccttctgcatccgctgctacgccacagatggtgttttcatcccaatagactgccagcaactgatctaccgcatccttaaattcaggtattccgtaagtaaccagattgttgattatgctgcggtccgaatattcgtccggattactcaaatcgcccatgaaacatcctgtccaccaatgagctgccttgtcgttgtgggatactttcaacaacagaacggcatattcttcgaagcctgcgaagttgatgggatccaattgggcgagttctgcgccatcataccatgcgtagctgtcgatgcttacttcggcaagcgcagcggtattctcttctaccgtatatgtttcactgatgatgaagggagcgacagggactcctttttgatcgatggcaacggcccacattcgcaattgatcgcctgtctgaagattccgttcaaattctacaggacctgtggccgcgagcatggaaaccgcctcggcatgcaggccggtggtgcccatatagtctttgattttggattcaagcacttttttcataccctcctcgatattttcgccgaaggcctgataatcctcttccgagataagatcgaatatgtaaacgacatcgtctgctgacggaacggtggagaacttggaggcgacaaccgaacttaaagtgcattcgaattgaacgtcgaacgtttggggatcccctccttcaagagtcttgaatgtttcggttttgatcggtgtggtcgggaatccctgttcgcatccgaaaaccgcaatttgatattcccagcccgggttgagttcttttgcttcatacgtgaaaggtccctcgtggagatacatgtcgagcataccccagccgaaataacgatcgatcagatatttttgataatccgtacccgtcggcacctgggactggatgtcagccgacagaacatccaggaagtaaacatcgctgttcgacggtgtaacggtaatcgatgctcctgtctgtgtgattgctgtcgttgcgatttcgaatgtattggtggattcgggtgcagtctgcgctgtaaaagcttctgcggtaggcttcgtcgtcgtgtgtccgtcggcatcgatacctactgcgacggcccaatacttggctcccggttcgagtcctctggccgtatatgcatcgttgccgtaagaagtaatggctttgaccgcctcctcgcgggtcatctcctgctgctccatcatcactacctcgatgaaatattgtaggtaatcgtcaaaaccgtgtttttgggattccagccaatcggcgtcggtgacgatatcactgaaataactttttgtttcgttgctcggagaaaccgtgatttcagctgtcgtcggagtaatgttacttactgataccttgaatgtcagttgattaggatcagtttgggggggggtacgtcggttttgtcgtcactgcatgctccggcgaacaccgccaaaataagaaaaggaattaaaatttttttcataatcttattattttttagtgattaattcactactaaaataaataaaagtagtgagaaaacaaaaaacggatgattttttaggatgttaaatttaagttttttaaaattggattgatgtcttatgaagaggtaactttgtattcgtattctcggaactgccggaagtaaagaaaccggtcatagtaacttggggtatgatgctgttgtgatattatattgaccattcgaataaattcggagcctgtgtccgtttatacccgaggaaaagggtatgtttgggattcgagatattgatatttgattccctgcagaagcatcccaatatataggtatttgggagagtgcaccttgccgggtaaccttttttcattatttttgcacctgaaatgagcggacaaaaactcatacgggtattcaatgcgggggcgctgctgctgatcctgctcgcggcctatgcgggcaaaagcctgcatacccatcccgatgagtactatcgttacctcacggagaacgatgcaaataccacgtcgccggctcttgtggacgactgtgcgatttgccatttccatttcttctcgtatatccattctaccgactgggtcctcgacagtgagttccgtttgctggaaacctttttccggccggagtgttacgatccggcaatcgttgcgatatcgggctcgcagctccgtgcgccgcctgcaatcgggtagataaattcgttccggaaccattcgtttccgggactattcgaccgcacgtgccgagcggcgcggcaaaacatcgttttcacagggtattctctctcatcggccgtattacgggccgttgcccctgcctggcgaaaacagacccattttacatcttaaaacataggattatattgtgtatccatttgggagcatagcgccccgagtccattccgaggaggagatttaggaggacttcattacagacgcagcctccggccgcgaataaacgccctcgaactcgattccgcaaccgtcggataatgggacattgaagatataatcgcttaattattataatatgaaaaaattgatcctcttggccgtaatgtgcctggtttatcatacactttttgcagacgaaacgaccccgaaacctcaaagcgacgctcatctttacggtcatgtcatcgacagcgaaacaggcgaacatctgccgtatgttactgttacgatccccggcacgaccatcggtactgccaccgatgcgagcgggcactatttcctgaagaacttgccgacgggcacgattaccgtcgaagcccgaatgatgggttacgatcctgtgcgccatgaggtatcgctcaggaaaggacaatccctcgaactcaacttcgagatcacggaaaacggaatcaccatggacgacgtagtcgtttcggccagccgcagcgaaaccacgcgtcgcaaggccccggccctggtgaacgtcctcgaccgcaagattttcgacaacaccaactcggcttgtctggctcaggggcttagtttccagcccggcgtacgcgttgaggacgactgtcagaactgcggttttatgcaggtgcgtatcaacggactcgacggacactattcgcagattctcgtcgattcgcatcccgtcttttcggccctttcgggcgtttatggactggagcagattccggccagcatgatcgaccgcgtcgaggtgatgcgcggaggcggctcggcactcttcggctcctcggccatcggcggtacgatcaacatcatcaccaaggaccccgaccgcaacagcgccgaagtcggtcacacgatcacggcgatcggcaacagcagcagttacgacaacgtcacctcggccaatgcctcgctcgtcaccgacagccgtaaggcgggactttatgtctatggacagaaccgccaccgctcggggtacgaccacgacggggacggcttcaccgaaattccgcaactgcaatcccaatccctcggactgcgctcattcttcaagaccagcgcttattcgcgtattacgctccagtacaataccgtcatggagtaccgccggggcggcgaccggctcgacctgccgccgcacgaagcgatgatcgccgagcagaccgaccacaacatcaacggcggcagcctctcgttcgacctctcgtccgccgacttctccaaccgtgtgaatgtctatgcttcgttccagcacatcgcccgcaagagctactacggctccaagcaggatcccgacgcctacggtcgcacgcacgacctcaccgtggcgaccggcgcccagtacatccattcgttcgaccggttgtggttccttcccgccgacctgaccctgggcgtggaatataactacaacgatctggacgacgaatcgatcggctatgattatcgaacgaagcaaaaggtgcacatcatcggcgcctacctgcaaaacgagtggaaaaacgagcattggtcgctgcttatcggcggccgtctggataagcacagcctcgtcgatcacgtaatcttcagtccgcgtgccaacctgcgctacaatcccggagagggggcgagcctgcgcctgagctattcgagcggcttccgtgctccgcaggccttcgacgaggatatgcacatcgccatcgtgggcggcgagcgggtacgcattcgcctggcggacgatctgcgcgaggagcgatcgcacagcctcagcctctcggcagatctttatcaccgtttcggaaaagtccagaccaacttgctcgtcgaaggtttttacacgacgctcgaccacgttttcgccttgcgtccgctgcccgatccggatacggacgggagtacgatcaaggagcgttacaacggctcgggcgcccgcgtcatgggcatcaatatcgaaggcaaggccgccttcacccgctggttcgacctgcaggccggaatcacccttcagcagagccgctacaaggaaccggaacagtggagcgaagatccggaggtcgcaccgacccgcaagatgttccgcacgccgaacacctacggctaccttacggctgaattgacccccgtacgcaatttgcaggcagccattaccggaacttacacgggcaaaatgctcgtgcagcacatggcgggttcgggcacgcccgtcgatcgggccgtcacgacacctcgtttcttcgacctgaacctcaaagtgtcgtacgacgtcattctctataaggagatcgccctgcaactccatgccggcatccaaaatatcttcaacgcctaccagaaagacttcgaccggggggccaaccgcgattcgggttacatctatggcccgtcgctaccccgcagctggttcgtcggtgcgaagatcagcttctgacggtctgccggaagctccggcggctccttgcttcgccggacagggaatatcgttgtcgctcatccggattgacggcatacggaacttttttgaaaatatcgctttcggaaagtcatgatattttccgggtataaaccgaacggagctgcttggcggctccgttcgctcatggcggccgaacgctttagcaaccattattgcaccgatttgcacgagccgcaaaacaattttacggtttttctcgtttttaatatatcgatccatccgtcaaaattcgtatttgctgcgatttttgttctgttctcgaaacaggggtggcttgaataaccgacatacgatccctataaccagatttaaccccgaatcgttatgtttaactcccgatcttccatctccatctcgacgtttctttcttcactgattggatctatcatgcgcgggcgacgctccgtccgctgcggccaaacgtgcgagtaccgcaaggccagactcatcctgacccacgacccgggcgaagagctgtttctgggggcccttcatccggctgcggctcttttccgggaacatatcgatatccccgaactcatcgccgaacatgctacttatcgcaaagtgctcgaggaggccggagcgagggtactcacggtacgtcagatcctgctcgacggaaccggcgcggacgggaaacccgccgaccggacgaagctggagaacctgcgccgcttcgcggccggttttcttaccttcgacacccaaaacctctctccggaaacagccgagcagcaaaaggagtaccgacaatccatcctcgccaagacatcgccccgggatctggtgcggattattctgcgacaaccgatcatccgactgtcggaaacgcagatcaacacggggctcaaggccgaatattcggaaaaccccgtgatgaatctcttctatacgcgggaccagttgataactactgccaaaggcgtcgtaatcggacgcatgaactccccgcagcgggagaaaggatgcgacattctgcaattctgcctcgaaaaaatcggcatgaaaccgttacaccgcatcgatggggagggagctcatctcgaaggcggggatttctatccgttcggcgatacggctttcatcggctgcgggatgcgcaccacgcaaccggccatcgatcagctcatggagcacgatttgctgggctgcaaccgtctggtcgtggtcaaggaccggttgttcagccaggcggaaatgcatctggacacctatttcaacattatagaccgcaatctggtgacgctcacagcccggcgtatgaccaccgatccggattctccggatctgctgctggccgatatttacctccgaggtgcaaacggcgtctataccaaaaccgaagaagatgtcggattcgtcgaattgttgaggaaccgtatcggtgccgccatcatccctatttccgaagaggatgccgaccggctggcgggtaatttcctgacggtcgggccgcgccgtatcatcggggtagcgggccagtccgaagccctgcggaccgaactgaaacaccgaggggtgaaggttacctgggtcgggctcgacaacctttgcaaaggctacggtgccgcacactgcatgacgcaggtgcttcgcagacggtgaagactatcctccgacgtatgtaaaaaagacactccggggaagtgaaaagtttttccgggaatgaccgtttccgcaatgttccgaaagaatatggccgctgttgcccggcaaggagcgaaatcggttgttatgttccgttcatacgggtcagacgggaaactttccgcttccggatgcgggtaagtttcttatagaatacgacttacttccgacgaaatgtgcggcggaaggctctttcacgaaaaatccccggtcgaaagaccggggatctgctatcgttgtcggcaaacgcttacaacgccttgatctcgtgaagcacctggttggtcttgcggaccgcagcagccgatgcctcgaatttggcagcctcttccttggtgaggtcgagtttgacgatcttctcgatacccttgcggccgatcacggcgggaacaccgatacagatgtcgttctggccgtattcgccttcgaggtagcagcagcaggggacgatcttcttctgatcatgcaggatcgattcgaccatcatcgaagcagcggcgcccggagcataccaggccgaagtgccgatgagtttggtcagcgtggcaccgccgaccatcgtgctggcgacagcctcttcaagtttcttcttcgaggcgaattgcgtcacgggcacgccattgaccgaagccttcgaaagcagcggaatcatcgtcgtatcgccatgaccgccgatcaccatgccgtccacgttgttgatgttggcgccggtggctttcgccaggtaacatttgaaacgggccgaatccaaggcgccacccatgccgataatccggtttttgggaagtcccgaagccttgagcgccagataagtcagcgtatccatcgggttggcgaccacgatgatgatcgcgcggggcgaatatttcaccacgttctcgatcacgcctttcataatgttggcgttggtgccgatcagctcctcgcgggtcatgcccggcttgcggggaatacccgaggtgatcaccaccacgtccgagttggcagtctgcttgtagtcgttggtcacgccgacgagcttcgtatcgaaatccatcagcgtagaacactggtacatatccagcatcttaccctccgacaggccctctttgatgtcgatgaggaccacttcgctcgccacttcgcggcaagccatcacattggcgcaagtagcgcccacggcgcccgcgcccacaactgttacctttgacataatgttatagttttaaggcgagtccgacgtattgatttcggatgtaaaacaaaaatactgtcacaacagaacacgtcggactcacgttacggtatcttttgatgccggattccatcctgacactccctgccgacacccgtcgaaaacgggaggctgcggggttcgatttacatcgaacgaatattagccgatcaactctttgtactgcgcgtcggtaagcagcgactcgcactccttgggatcggtcagtttcactttgacgagccaaccctctccgtagggatcgcggttcacgatggagggatcggcatccactgcagggttgaactccaacacttcggcgccgacgggaatgaaagcgtcgctcacggtcttcacggcctcgatcgagccgaagacgtcaccggcggacaaggtttcgccgacggtcggaacatcgacgaatacgatgtcgcccaactggctctgtgcgaaatcggtaatgccgataaaagcctcaccgccctctacgcggcaccattcgtggtcattggaatacttcagatttgcaggtacgttcataattttcggtatttgaattggttaaaatgaaatttattcgcggtctaaaatatcattgcaaatataaggttatttttcgttcggccaacgttatcctgttatttttttaacacgcagcccgtcccgtccgttcgagccgtccgcttcccctcgataacgaactctatctcccggaacagatacccttcggtacggccgtcgggcagctccagcagcagctctcccgaagggcgcacgccccgcagcacggcctccactgtccggccgtcgggataacggtaccgatgccgctctccgagccggtacatccgccgtcggtagtcggcttgcagcgcctcccgatcccctttctcgagttgttcgtaccgggcggccagacagtcgcccaagcggtgcagtacctcctgccgatcgtattcgcagccagtttcgaggcacatcgacgacgggttcggcaacgacggatcgaaccgggtctgattgacgttcaccccgattccgacgatcgtacgcgacaggcggtcgcccgtcaggttgtgttcgatcaggatgccgaccagcttgcggtcgcccgcatagatgtcgttcgtccatttgatccgggcgtcgatgccgtaaccgccgaaaaggtccgtcaaagccaaagctaccgcttccgaaagcagaaactgttccgaaacgggcaggaaacggggttcccataccagcgagaacatcaggttgcgtccctcctcgctgctccaggtatgcccccgctggccgcgtccggcagtctgccgctcggcgcagatcgcatcgccgtgtccgtagcgaggattccgggcctcgtcgttggtcgaggtcgtctcttcgagaaagtgataacgggtcctgtgcatccgaaaggtactataccgaaactccgaaatcccggagcgccgcggtgagcgaagttttcttgtcggtggactccttgcggcgtccgataatcagcgcacagggaacgccgtactccccggccgggaaacgcttggggtagctgcccggaatgaccaccgatccggcggggacgtatcccttgtactgtttgggttccgcctccgttacgtcgataatatgcgtcgatccggtaatcaccacgccggcgcccagcaccgattcgcggcagatgtgcgccccttcgaccacgatggcccgggagccgatgaaacagtcgtcctcgatgatgacgggggccgcctgcacgggttccagcacaccgcccacgcccacaccgccgctcaggtggacgcgctcgccgacctgggcgcaggagccgaccgtcgcccacgtatcgaccatcgtgccggcaccgacccaggctccgatattgacgtaggagggcatcaggatcgcccccggcgaaatgtaagctccgtagcgcgccacggcgtgcggtacaacccgtacgcccagctcctcgtagccgtgcttgaggtccattttgtcgtgccattcgagttctccggcccgcatggtgcgcatctcctgcatcggaaaatagagcagaatcgccttcttgacccactcattgacctgccattggctccgggacggatcgatgggttcggccgttcgcaggcggcccttgtccagttcttcgataacggcgcggaccgcctcccgcacacgggactccgcaagcaatgcccggtcgttccaggcctcttcgataatttgtcgcaactgattgtccattcctgtttttcgctttcgttattccggtttcaaagttacaaaattctcctgcggatcgccggatgccggcaactttttcgtatattctgcgaatatatggaatgttcggacaatctttgcgaacaaacctgcacgattgcgccggacttttcgtatatttgtctttcgaaacccttcaaatattaaaatatgttaaaacacgttaaaattactttggcggttttctgtgccgctgctgcacttaccgcctgtaagtcatctatgaaaatcaaacacctgccttatcccgatgccgagcgtacggaagtcgtggataactacttcggcaccgaagtcgccgacccctaccgctggctcgaagacgaccgttcggaacagacggccgcctgggtcgctgccgaaaatgccgtgacgcagaattacctggatcaaattccgttccgcgaggcgatgcgtgcccgcctgaccgagctgtgggcttatccctgggagggagctccggctaaattcggggattattactatttttaccgcaacgacggacgacagaaccaggccgtgctgtaccgccaggcttcgctcgacgccgagccggaggtattcctcgatcccaacacgctctccgaggacggaacggttgcgctgtcgggcatctctttctcggaagatggccgctacctggcttatgcggcttcggcttcaggttcggactggagcgacattcatgtcatccgtacggcggacaagcagcccacgggcgatatcgtaaaatgggtgaagctctccaacgcagtgtggacacccgacgaaaagggattctattacagtacgttcgacgttccggaagcgggcgtctattcttcccagaaccaatatcagaaggtatattatcacacgctcggtaagcctcagtcttccgatcgtctgattcatatggacacacaacatccgttgcgctatttcgcttccagtgtcagcaaggacggcaagtggcttttcatcacggcatcggagggtacgtcgggcagtgagatcctctaccgaaaaagcagcgataagaagttcaaggtgctgcttcccggctttgccaacgaccacgagattattcgcgccgagaacgataaactttacgtgcgtaccaacctcgatgctcccaactaccgcgtgatccgcatcgacctgaataatccttcggtgatcgaggagattatccccgaaaatccgaagaatatgcttgagatcgtcagcaaaccgggcgactatatgatggcttcctacctggaggatgcccaaagccaggtttaccagtacgattggaacggcaagctcattcggaaagtcgagctgcccgccatcggatcggcaggcggattctccggtaaaaaaggcgaaacggaggccttctattcgctgaccaacttcacgacaccttcgaccgtttaccgttacgacctcgcaacgggcgaatcgaccctgtataagcgtcccgaagtgaaattcagccccgaagactacactacggaacaggtgttctacaccagcaaggacggcacgaaagtcccgatgttcatcgtctatcgcaacggactgaagctcgacggcaacaacccctgttacctctacgcttacggtgggttccaagtcagcctcgcgccctggttcaacccggctgccattatgttcatggaacagggcggcgtttattgcgtagccaacctgcgcggcggcctggaatacggagaagagtggcacaggggcggcatgctggacaaaaaacagaatgttttcgatgatttcatcgcagcggccgaatacctcattgccaacaaatatacctcgtcgaagaaactcgccatcgcgggcggttcgaacggcggcctgctggtgggtgcctgcgaagtgcagcgtcccgacctgttcggcgtctgcctgccggcggtcggcgtgatggacatgctccgctaccacaagttcaccatcggctggggctgggtcgtagagtacggctcgagcgacgacgaggagcagttcggctacctctacaaatactccccgctgcataacatcaagaagggcacgaagtatcctgcgacgctgataacgactgccgaccacgatgaccgtgtcgtgccggctcattcgttcaagttcgccgccgagatgcagtacgcccagggcggcgacgctccgatcctgatccgcatcgacaccaaggcgggccacggcgccggcaaacccgtctcgaagcgcatcgaagaggctaccgacgtgttctcgttcctgttcgagaatacggacacgccttacaagacggtcgaaacgaaataatgctattccggtcgcatgtccgaaacttcgttgaaaacggagtttcggaagcagccgggccgatcccgatgcgggtccggaacccggcacgacgaagtaccggccgataaccatactgttttattgagcgatgaaagtttacaagttcggcggcgcatcggtccgcaacgcggacggtgtgcaaaacctgctgaagatcatcggtgacgaacgggatctgttcatcatcgtatcggcaatgggtaagaccacgaatgccttggagaaggttttcgaagggttgcagaagggcgacaaagccttctcgatggagcacatcaccgcgctgaggcaataccacgccgaaatcgtaaacgaactgtacggcgctccgacccggctcgagaagatcgaacggcttttcggggagctcgaacaggtggcgaccgaaacggtctatcgtccggaagacgccgagctgtggtacgacaccgtcgtcgctttcggcgagctgatctcgacgacgatcatttcggagtacctctccgaacggggtatcgacaattgctggctcgatatgcgacgttgcttccgcaccgaacagcgacacaaggacgcctcggtcgatatcgccgcatcgcggactctgctgcgcaacgccatgaaacagtctaaggcctgtattttcatcgggcagggctttatcggaggtgctccggacggcacgaccactaccctgggacgcgaaggttcggattactcggcagcggtggcggccaatatcctcgacgcggaatccatgtcggtatggaaagatgtggacggcatcctgaatgccgacccgaaggttttccccgatgcggtgcagatcgcggaactgaactacctggacaccatcgagctggcttacagcggggcacagatcatccaccccaaaacgatcaaaccgctgcaaaacaagaacatcccgctctacgtgcggcctttcggggacaagcgaaaaccgggcacggtgattcgccgtatgtcggcgccgatcgaggttccgattctgattctgaagaaggatcaggtattgctgacgatccgttcgcgggacttttccttcgtgctcgaagagaaattcgcggcgatcttctccctgctggagcgataccgtatcaaggtcaatctggtgcataactcggcggtgaacctcagcctctgcgtggataactcctggcatatcgacgaggcgatccaagccctccgaaacgaggagttcgacgtaatgaaggtcgagaacatggagttgctcaccatccggggctataacggcgatttgatggagcgatatgcttcggggccggaggtttttctgttgcagagaactcaatcgacggcccgtattgtccggaaaaaccggtagtccaacttcgaaaaaagacgctaaaataaaagaagagaagtggggtcgatgttggacgaatacaagaaaaacattagaaaaccgaatccggaggagctacgactcattaagtttttggtacaaaaggcatctttgaatatgtccgagggctgggaaagatctttgactgtttcttgtttgaatgatggaggaatgggcagtatgaaattatatatgtctttaccgccgaaagaaataatatcaacgatttttgtcagtgagtgctcttttaaggattctgatggaatagatgtgttagcctcattatatctcgatcaagatcatgagatttgtgaagtggatatttggaaagctgatttttctcctttgataaggatctcttcggatattagcttataaaacggaggaacatgggagatttgggatattcgaagcatgcatttcgtgtaaatggtgaaacttattatcctggaaaattatgaaaaaattaataattttattgatcagtcttttcttcattgcctcctgtgccgttgtaaaatccagcagaatagttggaaaatgttacttgggttatccttatcgccagattatggtattcatttgtatgctgagttttatgccgatagtacgtttttatataggtcagctggctgttatgatataatcggccattggtacataagcggtgatacagtgattttatcttcgccaaatttcaatgtcgaaactcgtcctattgatctttatatttttgcagaagaagagattacagattggcgttttcctgatgagtattataaatttacggatatggagggtaatagagatgcatatattattaaaggagatactttatatcctgtactgaaaaacgggaagtctctaatagaatatttgtacgcaataccgaaaccgggccctgaattaggtctatataatagaggaatttattttgggccgaaaaaagataagtaatctttgattgttactgccggacttaatgtccggcagttttcttttgtagattggtgaattttatctatctttctacaaagaaaaaatgtaattatgaaacgactaataattttgttaatcggacttttctttattgtttcctgttgtagtgtcaggcccggcaaactgaccggtaaatggtttcgaagtacaacttgtgtagatgatgcaagaactcctggattatatgtttacttttatcctgatggcggctttttgtaccaaatggcctatgctgacggagctacaggtgcttggcgaatcgaaggcgatactgttattttatggtctccggatttcagtatcgtgttggatagtgttttgctgccgtacggcccacgctgttggcctaatttgaataaatatacagatgctacagaaaataatcaaaattgtcgcaaactaactaatgaacgaaaaaatttgccttgtttttaatctgaaattttatgtataagggaaaacgccgcattttttcggccctttctccttaacctttatagatacgatgcaattcaattccaccgaattattttacaaactgcatcagatagttttcgcaaaatccagctaacgggaatttcaccatctcgttccgtccgtcgggtgtggtgtattggaataggattgtatcggctttcacgtggtagtcgaacaaattcaccttttcgcccgttccctcgatttgtgcctcgttagccgtcattgtgccgattatcccgtccatatcttcgagttcgcattttcatccaaatatgtattgtcggttctttgtaaggacaatttcgacgggttttgtaatgtctgccatattaggggcaaacaagtagataaatgtttcgggaaatatttcgtctttgggttttcctacaagcaggactattccctctgtttggctccatttaaccgccttttggattatctgtttatcctctcatgcgtcggtctttcattcagttttaggttgtttgtatctgttcattttagctaaaatttaattgttatttatcttttaagatcgagaaacggtgcaaggtcttttgcagtataaagataagattattagcgaaataaacaaaataagaaagtgacaaactctgcaaaagggtcttatagattaaccttttcacaaagtctgtcactcggaatagaaaggacaaacttacacaaacagtttaatttatagaccgttttccaaagtctgtcctaatattttgtctttttttattttatccttttgtacgtttcagtttcttcaaatttttcgtgtgcatcctctccactacggaataaaacaagttgtgattgagatagtttcttaatttgaaaaacattttgaaattcacctgttgattctgtcattgtgagtgtgttgccattaacagaatatgtgaaatgcatgggcgagctatcatcgtttttattatctgaatagtcggtttgcacacaagttccattttcattgaaagtgtatgtccaataatagttgccttctgacgtaaggggatatgcatccgaccaatcatctcgtgtaccatcgctgaacgtcgcccacccttcataataagtaatctgccacgttccaacaattgacgcatccttgttgtcatcatcatcggaacaagccgagaaagaaactaccgcaaacatagcggctacaataagaaacaactttttcatagttgcaataagtttaggttgtcgcccagcaccaacgcgacggttaatttttagatttaattaaacagaaagcgtggtgctgaaaacttacttttgtagagaggctctggtatgccctgcgataaaataagcaacaacaccacgccgtatccgtaaaggatatgacgcggtaagatgttcgcctattctcatcgcttgaaatttaccagatttacgcagtatatatacaaaatgcaaacaacacccaataaagtgataataaataagctataaatcagtgttttataagcctatttttattttcagttgttttcagtactttcagtgaattggctcttatttggtgcaattttgtttcttatttgtttcttaatctcgatacttatccgtatatttgcaataggaaaaatgagaaaggaatccctatggcacgagttaagaatcatacaaaagtcaaagagccgattcgtcttcggatgaagccgttgagcgatggcagcaagagtctatatctggatatataccgcgatggaaagcggacgtatgaatacctcaagatgtatattatcccggagacggataataatgcccgtaggcagaatcaggcgacaatggatgccgccaatgccatcaagtcgaaacgtattatcgaactgaccagcaatgaggcaggaatcgtattccgtaaggacaagacttatctgttggactggatgaaggtttacatggaagcccaagagagtgcgggcaagaaagacggcaaccaaatcaagattgccatgcgcatactgaaagactatgccggagaaatggtcacactggatcagattgacggggacttctgccggggctacatcacttatctgttgacggaatatcatccgaaaggcaaggacatatcaaactacacgcttcacaattattaccgtgcgttgaacggtgcgttgaactctgccgtcaggaagaaaaagatgaaggccaaccctttcaacgagcttgagaagtcggagaaaatccgtaagccggagagtatgcggtcgtacatgaccatcgaagaggtacaggcgttgattgacactcctatgccccacgaggaatacgagatagtaaaatgcgcgtatctgttctcctgcttctgcggattgcgcatcagcgatataatcaagttgaaatggaaagacgtgttcgttgaccggggacagtaccgtttggccgtgtccatgaaaaagaccaaagagcctatttacctgcccctctctcctgaagcgttgaagtggatgccggaacgtgggggaaaatcatcggaagataatgtgttcgacctgccgtccgccaatacaatcaggatgcagctcaaaccttgggcgaaagcagccggaatctccaagcggttctcctatcacaccagccggcatacattcgccaccatgatgctgacgctcggcgcggatttatataccgtctcgaagttgctcggtcatgccgacgtaaaaatgacacaggtgtatgccaagattatcaacaagaagaaggacgaggcagtgaatcttgtaaacggtttgtttcactaattgacggcactatgtggttcatgtctaatttacaaacatcaatttatggcattgctccggttgtgaacgcaaccgaagttaatgctttcatcacatattataaactcaaaaaggtaaatcgacatgaaaagacctgaagacggccttctctctttttggagggagccaacacctgcagcacttcgctgcggagaaggatgtggcgaatgaacttttcgccctgctaaccgaagcaaaaacagtttatctccacgatgttgtgtcgggtggtaaacagtaccaccgttatgtggacgatttcgtaaacggacaccggtacatagactgcgaccatgcggcctgccggaactgccacgaaatgaacatccacatcgtcaaggggctgctgaccgagtacgcccgtttcgtccagatttgctttgctacgccgaatttcacgtttgacgagtgcatgaagctgaaacggatgtatgatacctcggaatcgttgcctccgctcggtccgccccacattgaccgaccggcagatctctccctttcttttggctgtgattttaccccggaacagatggaaagtattgtggcttgtgccaatacttatcatctgttctgtgtttctgtacgcattgaagacatggaggctcttttcgcctgtaagaaaggcttttccatccgagtgaacaatatccgccgtgtggtaatcctgttcgacgcgcttcttgaaaactcgcttatccagtcccggtggcagaatgttctcggcaagggtgcattcctgcagtccaaggacgggacacgttccgtttcggtatcgaccctgtcttccgcgctgtcatccatcaagaacaacatgacatcggtcgcatacggcatccgaaagaccattgaccggctgaaagaatgacaggaagtgacaagaagcgaagtatgtgaaaggtaaaagcatgagagttgcaatgatacgcgcatagtatcattccccaaatcacggcatcttcgtttaccggacatacctttgacctccgttagcgcgctgcataacggaggttgcatctccattgtcaaaaatcaaaccatgttattatgccgaatagaatgacattcatggagcggatgagcggacggctcgccgccatcgaatcggtactaaagaaattggaaccggtcgaaagtctcttggagcgtatcacgttgctggaaaataccatcttcacgaccaagagagtgttcacgtttcaggaagcctgtatgtatatcggggtttctgaaagtatgctgtacaagctcacatcgagcaaggagataccgcactacaaaccgcgcggtaaaatggtctatttcgccaaggaggaattggacgaatggctgttgcagaattatgaacctacagtgaacgaggccgtgcgcatggcgacggaagccgccgccacagaaccgttccttaataagagacgcaatggaaaacgaaagaaagactgaccgctcagccgatatgggaatggatgaacaccgcctgtcggacatccttctggcctcgcaaatcaaggcaacggacatttatgagaccccgccgcaaatcatctggatagacaactcgacgattgccacgctcggcaatttcagtgcatcgacaggaaaggcaaagtcgaagaagacgtttaatgtctctgcgcttgtcgccgcttcattggccgggaaacaagtgttgaactaccgtgcgcatctgcccgaaggcaaacagcggattctgtacgtcgatacggaacagagccgtttccattgccgctcggtattggagcgcatattgcggctggccgggctgcccacgacaaccgacccggagaatctcgacttcttctgcctgcgtgaatattcgccgtcggtgcgtgtcgaggtcatcgactatgcgctgcgtcagaacaaaggctatgggctggtcatcattgacggcatccgcgacctgatgcttgacatcaacagcaccggtgaatcggtggaagtcatcaaccggatgatggaatggtcttcaaggtacgacctgcatatccattgtgtactccatttgaacaaaggggataataatgtgcggggacacattggtacggaaatgagcaacaaggcggaaaccgtgcttgtcatcagcaagagcaacgagaatcccggtatcagcgaagtccatgcgctccatatccgggaaaaggagttcaagccgtttgcgttcaccatcaacgagactgggctgcccgtcattgcggaaggacactcgttcggagagcccccgaagcccaaggctcggacggggttcacggagctgagcatcgaacagcaccgggaagccctctccgccgctttcggggaaaagcctatccggggattcgacaacctgttgcaaagcctgatggtctcctatgaggcaatcgggttcaaacgtggtcggagcgtcatgataaaactgatgcaatacctgatagacaacctcaagctcatcatcaaacgggacaagctgttctattatgacatgacgcctaccgaggccatgctttttgatgaagaatgatgccgggcgcgggcctgtatgatttagtttactttagtatttatatatataggaaaaaactaaactaaaccattttcgtgaaaccaagtgaaagaaaaaagacatgaccatagcagaagcaaaacaagtgcgtatcgtggattttctggcacgtctcggtcaccatacgcagcacataaaatcgggacaatactggtatctctcaccgttacggaacgagcgtaccccgtcgttcaaagtgaatgaccgcatcaatgaatggtacgatttcgatgcgcccatataggctacacaataaatatctctatggcaagagattaggttagagttcaacagacctatcctcgaatttttccttaaaataatttgcataatgtgccgaacatactgacttttgtcgcagaggctgtgaagtcgcagcccaccagttgcagaacgatataaccttcatgtaattgttagtgggtctgttggcgtcggctgacagaccttttttgtgcgaatatgatgatttattcgaaaccatatagaacgaaaaaacatgaaagagaaagagcgaacgaatatcagacacgcgcgatgagtacgcggctgccgagttgcgagaatgcgacctatatgcttttcggcctgatggccgaggtgggcgaaatcgccgacaagatcgccaaatggcgccgaaagggagtgtgccggctggatatggatcatttggtcttcaatacggatgatctgcaagaggtggagggttacaaatccgagctgatgaaagaggtcggggattgtgcgtggtttatcgcgggcattgccgattgcttcggcttcacgctcgaagaggtcatgcagcagaacctcgacaaactcgccagccgccgatcgcgggcattgccgattgcttcggcttcacgctcgaagaggtcatgcagcagaacctcgacaaactcgccagccgccgtgagcgcggcgtgatcgatggaaacggggataaccgatgatcgcttatgacccacgactctcttttcagcgggatcggaggggctatctgattgcagatttttgaaacgataaacgaatacgaaagaaaatgaaaaataggatattaattatcttttgtctgttggcattaatcggttgttgtccctgtcatcgagtgttggtcatcaggtatcccataccaatttactcttctgttccatactcaaccagccgtaaatgggtgcccaagacacatcgggattcccttttatggcgagcatcgcgggaagccgtccgagctgcaaatgaagcgacaaaacattcgaaccctgtttacgaatttgagttggtgaaatagcgagattctcgcaaaatatcgaaataattatgaaaccaattgaagagagggcaaatgctgcttggtctgactatgaatacagagagggagaattgtactcaacatgcttcatagatggcttttctgccggtgcacaatccgagcgcgatgaattgacccgctggcgtgacccgaaagtggagctgccaaatgataatcgagatgttttagttaaaacaacattatgccgtgaatactgcattgccttttacaaagcaaatgggggccggaatcatcattggcacgagaacaatggatctttagatgacgatatggtcatcggctggcggccgattctcgaaaaagagtaagatatgacaaaagcatctatgaaaaccaaacttttgaagcggttacgaaaggaggctatattgaatcataacgattacaggatatgcccgatttgtgggaggatgtggcataaatcagaatgtggagttctacgccgtgttgcggagcatgggcgtatatagcgtggcccgatgaatacatcctccgccgcgttgcggagttaaaaggaaagagaagataacgcaattataaattgtatggatattacgaaaatgacagcagcacaacgcgccgaactgaaggcgcagcttgaggccgaggagcgtgccgagaaacagaaacgcgaagagagtattgccgcatacaagtcgtcggtggatgagttctgccgcaacaagtttagccggttgcaggcgttgagcgaggagatgcgccggctgaaagaggaggttttcggcgatgccgaaacgctgatcgcgcttaaggatgagttgttccggaccaaatcggaccgacacagcaatcaattcacgacttccgacggcaagatcacggtggcactcggttatcgcaccaacgacggctgggacgatacagtgaatgtcggggtcgataaggtcaaaacgttcatcaaatcgctggccaaagacgaggattcggcggctttgaccgagatggtcatgaatctgctggcgaaggatcgcaagggaaatctgaaggccagccgcgtactgcaactgcgcgaaatcgcccgcaaatcaggctacccgcaactaattgaggccaccgacatcatccagaacgcctaccggcccgtcgatacctgtcagttcatttccgtctcctacaaggacgacaagggcgtgaaacagacattgccgctctcgttggcggccatggagtagtcccgaacggttgtctgcggcggttcgattccgccgccgggaacattgccgaaaagtaacaaattttgtagctttgtatgtgtttaacaaaaaatataattttatggatctttatttcgtaattcttggaattctgttttttatttttggactcctccaaattattctgtttttcaaattatgggctatgaccaacaatgtaaagaagattgcacaaggcaatgattctccacatgttgattggcaacttcgggcttgtgttttaactggagatatggatcgcgccgagaaattgataattgaagattttgtcgaaaaggtgcgattacatgtcgtccaacacggtccatccgaatccataggaccgatcaaaaatgcgtgccgagccagattcaaggcgatcggaaaacagatgcctgaagccattgaaaaactccagaatggagcaaatatcattcagttgataccataattatcccgtttttatatgcgataattcttattcctgtcaagagattcgatgtaaatatgtatagagtgcgttttattttgcaaaggcccggctatcgcaaatgctatctcgaaggcctttatcgaccaagaggtaacctctcggtcaatgcgatgcgcaaagcctgtcaggaggaactccgacaatatttggaggcacaagatccggaatatcgtaaattcgacataaaactcacatatttcaaccgtcttcgcattgattttctactgaatgtggggattgtttgataacataaaaacgctgccaagaatcgaaaatcggcagcgtttttgtttcttccagtgcaaaatttcgtatctttgcaatatgggtaacacgtcagacaatcaactcattcttttccactgcccgaccattgagaaagccgggaaccggcggcgtacacgttctctgccccgttcgggagatggaaacatcacgtcgcgtgcagaccgaatcgccaagcgcaaccgcctcctgacggcccgttattactactggacagagttggagcggcgacgtttcgacgatgtgctgaagatccttgccgacaatgaatttttcgtcgaggaccgtacgatcagcaacgccctggtcgccgaggacgagttctacaacaagctgatccgtcaacgtacgaccaaacgccagttgcgtcagatgtttcccgggttcgactggggttaatccataaactccgattcgtagatcatccggaatattttcaatccgttcgacctattctccgttaagaccgacacccgggatgtcggattgatcttgcgtccgaaagaccaccattgaagcgccttgtgtatattctgcagggtgtcgtactgttgaagcgctttttcacgactctcttgcggtgcggatgcgtttgccgtaccccagacgttgaatgccacttgcagttgaaatctcacacgcacgcgttgttttccggccatgtgggtcgtgcattgcgggtagctcatctcgaccaggcagcaggggaaggccaccggaggccgttccgaaacattgagttgtccctgatccgaatcgatccatcgcaattcggggactttgtttttcagctgatcgcacagggcgatgaagagttctttttccataatcagttgtttaatacggattccacatgagtctcgattcttttttgcagctcggtttcgagttcccgggcgtcgccgataaactgtcgccggggaatgttcacccttcgggtgtactgccgaacgctctgatcaccccggcgcgtgtgccggatatgggccggaaccgcaaccgcacctttgaatccttcgttgtgtacccgggcatagtccactttctcgtttccggccgcgatgacgatccgcccgggcgtgaccacgacaggccggatgctgttgagcaaagctccggactgcacgagcagtgaccccgattgtttggggacccggggtggtgcccacggattcccgtcaaaggccttgtgccggaacgtgtcctggaaatatccgacggatgtttcagcgacgatttcagccgttccctgcaggatctcctccatacgcttctcgaggagtttgtcgatttctattttcataaaaattttgtatatttgttccgaagcgtacaattccgggggtgaatcgaattctgctatccctcgcgggtgatgggggcatgggaccaaagtctgggcttgatacagcggatgagtacgttaacccgaagcagcggtatgacactggctatccaaggcgttgcggatacctgcaggacgtgttcccaaggtaaacaacagtacgtccggacgcaaagacatgccgctacgacttttttataagcaagccccgccggtatctccatcgcgggtcaatgtggcggctgcttcgcgttttctgtttcaaattcggagtctgaacgatctcgaaccaggtcgttatcctatattcgagattttcatccacttcacagatcacgtcgatcacctttccgtcatagaattttatgaaattcatgttcctgaacggtctgtgataatcgttcaaccaaacctcgtcgggattcttcagcacctcttcgacacatgccagcagcggcacccgcactttctcatagctcccggtcgtatgagtccggaacaccttctcgtccataacgacttcgcggcccttgtagtcgtgcagcgtcttgtgagcctcgtaccattctgcggccgaaccgctgtattcgggcatcggttccgtcgctgccgccaggcgtttggcaaacgagtcgagtccccagtcgttgtagtagagtcggccaagtagcttcgaagccttgttctggaagcggcggatgtagaactggttctgcgtgaacacctcgccggtgagggcacggtttacgccccaaccctgtgctgcggcttttttccacgtcgccgttccgaagaactcgtccacgcgctgttgcgaggcttcgaccgtctctttcttgacctcatgggccatccgcggcacgacccggcagcgacatcgccagtcgttcggcgggaagatcttcttccatctggcatcgttgtagggaaggacgatcccttcgagctggcgatgagacggacgcacacgatcgtctccgaccgtccggtactcccagtaggggaacaactttgtcttgcccatcagccgccggtaggtgctggcggcttcggccgtaagtagtgccgtgtcgtactcggtacgttgccagtcgcggttgaatgccgtacaaatcttgcgggcctcacgttcgaagtcggcgaaattactactttcacggaagaggcggttgagttcctgcaattcggccagggttttggctgccgagaactggaacaggttaatctccatcgctgtctgtaaagcgtcgtcacgtactccgtacacaaccccgatatcagcattcccgatgctgtcagcttccggttgaacggccttcaaaaggtcttcggaaaggaatcgaaatagctccgtgtcgaacgcgggctgcgaggcggccacacgtcccatcagcctctcttcgagcgtatcactgtcctgcatccgcatgagggcagtgccatcgaacgccccgccctgcggggctttgatgaaaaaatcccataagcggcgccaaatgttccggttgtcggcattccgcaccttctcctcgacatccgtatccgtttcaaggtgcgagcctaataccatattcgacttttctccggcgatcacctctcctttgtccggcatggggatcgaatacttgtcgtgaatgaatgctgcggggatatcgatgatcgtcgagagcttcacgatttcgtccacggagagcgggtcggctgccttcggatagacgaagcggccgcctttcacgggtaagccgcaagtctccagaacaggcagcagccgttcattgagcgtacgttgtacaaaacgcaggtcgctcgtgtgtttcgaatcctcgacctgcagatgcacttctccgagcgagcgggctccgcgctcgccctgaatggtggtcagcgtctgtccgaggatcgtgataagcatctcttcattcgtcgcctgacggaactcattgaatgacgagccagaccccctatttacctctttggtttcaatgtctgcctccttggggatgacgagataaggtgcggatccggcctcttccaaggcttgcttaagcagttcccggctctgtgggtcgaacgtgttgtattttccgatacgctgaggcattccgaacagctcgatccattgagcatagtcgccaaatccaccgcgtttccagatagcatagggtgcagctttgagcagcagcccgtagtccccgggacgaccgacgaccagaaggttcggatcctggtcgtacggtaccgatcgatctcctgtgtcgttcagcagaatctgacagttgtccaggtcgatatacttgggtttgataggttcgacgtggaatccgctgttgaaaaagagctccacgcccgccctgccgtagaacagccggtgcatgatttcgcggatgagcgtttcccaggctgtcgtgtcgatcatcgctgcgatggcgggttcttcctgtccccgggcattcatgaagacgacttcagcattcagcacggcctcgatacgtttgttgatcgcatcggcgagaactccgtcgatcatgatgtcttcgaacaggtcgtagagatatttcggccgtccgttgtcggccgagcgcaaagctgaccgccaatctccgatgtcgtacacgcgacgctgcggagcctggacaacgatctgctgcaccactatcggctttgaggctttcgtgccggaactctttcgggaagatgtcttataacctatttgtgccataatcaaaaatgttgtgatcgttttgggttcgacccgaaaatgtactctccggcagcggggtcgggctttccgtcgccgtcggcatcctccattacgggtaggttgggtttgatctccgagcgctggacggacttcagccaggcgacggcccgttcgtatcgatcctgccggagctggagatccgttcctgcattgcacaggttgatgaagtgccatacggcgatgtccttgacgaaaattaacagcagtgcgttacgttcgtcaccctcggtgccgaagatcttcttacggtcataagccccgagataccccgaggcctcctcaatggcggcatcgatagccgcggccacgattgcatcgtcctctcgggcgatggtttcgatattctctttatagagatgcgtctgcaactcttcaggtgtcagaaaagccatattagaaacgttttgatgcgcgtactcgttgaccgatggtataggatccctcgttgagcgtggagatcttctggttgatgatccatacgcctccttcgatgcagtcagggccgtcggccggagatttcatttgccggttgagcagcaggaactgctcttcgaggcgtttcatgtgcggattctctcgttcgtcgatattcagtaccaggcgcccctggcggatcaacggttcgaggtttccctcgatgcgttcgaatttcggcggtttacagcgacagtcgggtgtgatgccgatgaatccccgttcgcgggcgcgggcggcgaacattgggaggaacacctgctcatagaaaggatcctgcaggctgttgttctcgatgaagtaataaacctgcacacgttcgctcgcataatcgcgcaggttgtagaaccagtccacgaactcgtcgttggtgacatggtcgagaaatcccgtatagacgtagaatgtcccgtcgcagtaaccgagcagaaaatccgctttgaaactcgatgccttgttgcgggcgtttgacggagaaggatcggcgtaggccactgcgaactggagccgttgcatcggcggacattttccccagatcacctccttgatgacctcgccttcggaaagcggattgttcatatactcctgctggaaggctttggtggaaatggtctgctcgatgcggcggatacgctcctcggtgttcttctcgggccaggtcgagcggccttcggcatcgcggatgttcacaatatcccaatggtcggccttggccccggcccgcgtcacacagcaatcccgggcaatgacgttcccgcagaacacgaccagcaggtcgccgctcacggatcgggttggaatcagggcttcctcgaaccactgccacttcttttttacaatgtcgggattacggcagtcggcatccgtgtcgaagtcgtccgggagaatcgtatccgggcgaaaggcatccttgcgggtgcctcgcggcgattccattgcaccgagcgcccggaatgccgcgcccgaggtcagcgagaactcgtcggcggtccagttgccggcctccctcaggtccccgtagtaagcctttaacagtgaattttgttcgaaggacttcttgtaaggatccagaagccgcgtggcattctcatggctgttggaaacgagcagcacgttgcgcttgcgtttcgtcagtacaagatacatgatgcacatgaagacgatggtcgatttggccagctcgcgtgaccacgagagcacttcataccattccggattggaggtgatccgccggatcgccttcttctggaaggaagtgaagggatgccgggtgtattcggcgaagaagaaaagcatccacgaaacgggatccttttcgagcttctcgagtcgcctcatccgttccacaggtgagagtttgtccaccgccttgtcgcgcttcagggcacggtggtattcacgccattcgttccaggcgcgcatgtcatctactttacccatttcagccgttcctgtatgtatgaatcgaaatagtccgagagcatcttggccttctccaggtcaatagctcggacatagtcgagaatatctcttgacacattgacaatgtcccgcacggaggcctcctgttcgagcgcctcgaggtcggcggtgagtttgcgccggatatctgcctccttgaccgtcggatagcgcgcaccctgctcacgcgccgcgatgctttcgtcgagttcgttaagctgcatgagtgtcgatttgatccgtgcctcacgggtttggaggaaattcaacttgagaccctcccactctttggcccatcgtacgatagtaatcctcgagacaccgatcttcacggcaatctcggcttgggtgagatccgtagtgaggaaaagtagtttcgcccactccttcttctgcttgttatccaactcttgtgtcatgaaaaatctctgttttacaccccaaaggtaagctcttcacccgaacggagcgaatcgtggataaatggtctgcatgtaaagtgcaattaaagcgtaataaattgtaaaacaatacaatataatttgcaagacgggtgttttcaatccaattttgccgaaaaatgatggcttttatgaaacgatttacattcgtgttgcacgacgagacggtcaatacctacgggttccgtatgctcaccagcggcgctaatctcgaggagttccgtaagaaccccgtgatcctgctcaaccataaggactgggagcttccgatcggtcgttgggagaacatccgtattgaaggtacgcagatccttgccgatgccctcttcgacgagaaggatgacgaggcggtgaagattgccgacaaggtcgaaggcggattcctgcgcatggcttctatgggagcctggcctcccgaagaggtgagtgacgccgcagagttgaaacttcccgggcagacgcttccgaccgtgacgcgctggacagcccgtgaagcgtccattgtcacgatcggggccaatcataatgccctggtgcttttcgaccgtcaaacgggaaaacctctcgatctcacggatgcttcgactgtcatccggcttatggacaggctcaatcactcaaaaatcgattcgaatatgaacaagactttgaaggaagtcctcaagttgcaggactcagcacaggatgccgaggttatcggcgctgtgaaccggctgatcgaaaacaacgaccggctaacacgtgaaaatcaggaactcagagatgctgcagcgcgtgcggagtccgagcacaaggagatccggaagtccgaggcgattcgcctcgtggatgcagccattgccgacggaaggatcaataccgcaggcaaggaggcttatctgaaactctttgatacggatttcgagagtgccaaagccaccctcgaagccattccgcaccgcaaatccgtcacagcgcttatccgtgagggtgaacgacggcagtcggtcgaactctccgaccttgtaaacaagtcgtgggaagaactcgataaggcagggcgccttgttgaactcagggacaaggcgccggaactcttccgtgagaagttcaaagcggccttcggtaccgaacctaacatgtagaactcatcaaaaacaaaaaacattatggctattcaaaaagaaatctgggagaaatcgatcgtcgaaggtctgttcgctcccaacagcttcctttcgaaagcgttcaacgccgacgagtatgtcgaagcgggaaagatcgtgcatatcccgcaggcaggtgccgcttcgaaagtcgagaagaaccgaacgtcattacccgcaacggtaaagcagcgtaccgacacggacaaaactttcgagctggctgctttcacgacggatcccgttttgatccccgatgccgacaaggtcgagctgtcgtacaacaaacgcgagtccgtattacggcaggacaagctcgccctgcatgaggctgtggccaaggattttctgttcgcctggagtcctgcctcggatcgtgtgatcgaaaccacgggggcaccggtggatgcttacacaccttcggcgacaggcaggcgaaaagggctttgcagggcggatattctgacgctgatgacgaaattcaacagcgagaacattccccaggagggccgctacctgctgctcgatgcgcagatgtacgcacagctgttgagcgatctcactgccaatgagaactccgcattcctcgcctcggcggatgcccagaacggcatcatcggaaaactcttctcgttcaacgtcatgatgcgttcacaagctacgctctacactgcggataaagctccgaagcggtggggcgaaagcggtgccgccacggacctggccgcagcccttgcctggcacgatcagtccgtatgccgcgccttgggcgaagtcaaggcttttgagcaggagaaagcgcccgactattatggggatgtctactctttcctcgtacgtgccggaggcagcatcatgcgcggcgataatgcaggtgtaatggccctggtcggcaccgcaaccgagtaagccatgaaaccgacggatttcaagcgcacctattatccgacaatcgagcgggtctgcgccgaaacagggttgaatcctctgtttgttgcggcgcaggccgccctcgaaagcggatggggcgatcatgctatcggaaataatcttttcggcattacggccggagataagtggaccggaaagcggcgaaccgaacggaccttcgaatacttttcggatgaccggcagagcggacgattcgagaaggtttattcgatcacccggacttcggatggacgctaccgttacgaggtcgatcgcaagttccgcgactacgacacgccggaggagggcatccgcgaccatgcgaaggtcctttccgccaaacgctacgcagtagcctgggcgtatcgtaacgacataacacgtttcgcttatgagatcgccaaggccgggtactgtacggcagaacccgcagcctacgcggatttgatctcgaagattgcacgcatgatcgaacgggcgtaaactaactttcaaaaaccgattgaacgatggacagcatttggatgcagatactcgctttcgcacttcccgggggattcctcggcagcgttttcacctggatcttctcgcgccgcaaacagaacaacgattttctcaaagagttgcagagttcgatcaacctgctttcgggcgaaaacaagaagattctcgaagaaaatatccaactgcggcgggaaaacatcgacctcaaggccaaccaggaagagatgctcgtacgcatcgaccggctgactaaagaggtggagcgcctccgcaagaccatcggaaaacgaaattcgtatgaagacaagactctttttgctgctatccatcctgctgctggtaagttgcactgcgacgaagaagctcctctcgacagggacgcagaacagtacggataccgtgtcgcacatgcaacgcggcgcacaaaacgccgtagagcaaaccgcacgagcggcaatgaactctcgatcggaggagacctctgtgctgcgggcgctgcggacggaggcgattccgcttcggacagcagcggtgacggtgacggaggagagcctccgtaatctgccggagggggcggcctatgttgcccgtgacggtcggctgacgctcgaagcccggcgtgacggggataccatccgcatttcagcacgcagcgattcgcttgcccgacgagtcgaatattacaaagcgacctcggcccggcaggaccgatatgcagattctctgaaggagagtctggcagaaacccgggaagcatacgaccgactcctcgaagtctccaggcatcaatcttcggaaacagcaatacaacaaacgcggtccccggcctatcggggaaggtggatgcttttcggaatcgttatcggatgtctcggcggctggtgggctcataaaacaaacttatttgcaaaacttttcaaaacaatttaattatgtctaaacgatctgtaattcaaactaacgacggctatctgatgctgctcgacgctgtctatttcaacggcagacgcatggggaacatttcggaagagggccttgactggggcggtgaagacgcccagaccgtcgaactctgggccgcacagattcggaccagtcccgtgctggatatcgaaacgcgagccgcgacgaatgagattaccggaaagatgatcgaaatggttccccagaactgcgtcgatctgatgggcggcaaagtcgcgggtgaggagtggcaaatgcctgccagctcgatgcgtgtcgaaggagatatgcgcattctgaccggtacgggtaagaccgtcaaactcaagcgcgtttcgttgcgtgcctcgaagattcgcggcggcttgggcggcgaaaacgtcctcggcatcgaattcggactgaaggtcctggccccgctggacggctcttcgcccggttcgattctgccgacggagcccttcatcgaggccgacccgacgtcgctgaccttcgaacaggcaggcggcagcctcccggtcgatatcgaagcatcgggtccgttctcggtaggtgctgtgcccgaaggcttctcggtggaagtcataaacggacgcgtcacggtgatcgccgaagccaattccacggaatcgccccgctccggacaactggaattcatcctggagtccgatcctgaaacaaaagctaccgtatcgctttcgcagcccaatgcctaagccatgaaacgcaatgtagaactggaggcagcggaagctctgctcgatgtggggattctgctacctcttctccgattccgcctgcccggaggccgggagcgggtgctgcgcgtaacgatgcggcgcccctgcctgggagggcagatgcgcatcgtacgccactacctgaagctgggaatcacggcccgggaatgggatgctttctccgaagacgaggagcgtgcctttttcgaccggcatgccaaacgcctttcgctgatccttgcgctgacgatatgtcgcggctatctgtccggactcctgctggcccccgtggtggcctggttgatccggtggaaggtaccctccgagtaccggatcgaagcccagcgctggttccgcagaatgcggggcacgcgggattttacgagtattatcgaatcggccgagaggatcgatcccttccggtacgaagcgagccgccccaaaagagcaggaaaggggagttaagaaccgtttacgagagttcccatagccccttcggaatcgtttggcaaattgcctccgcaacaggatggtcggtgcattacattctgtggaaggtcaatttccagacactggccatgatgctggccgatgccccgcattatcgaagcgtcccggccgaatgtacggaagccgggagtgcaacgggaaaacccgataccgcacaactctttcaatcgaaactcaacttgcaatgaaacccgtcgagatagaattcctcgtaaagaacaatacccgccagggactctccggagtttccggcgggattgatggtgtcgagaaggatgctatggatgccaggaaacagatcgaagctctggaggcagaggtggcacgattgagcaaaacaatgtctacgacaccgaagatggatcaaagtgataatattcgacagatcgagaccctgcaggctcgaatcaaggaacttgaagaggagctgggccgcgtttcgaagagcgcgaaggcagtctcagaaacggccaaaaatacgacaatcgttccttctgatgcaacgaaagctaagagtacattcaacggattgaacatgtcgatccaacaactggcccgggagctgccggtattgtcgatggggcctcaaatgttcttcatggccatttcgaacaacctgccgatcttcaccgacgaactggctcgtgcgcgtaaagagtacgaggcgatgattgccagcgggcagaaaggcgtccccgtgtggcggcaggttctttcgtcccttctatcctggcaaacggcgttagccgtcggaatcacgctgacagtagcgtacggcaaagagatcggaaactgggtgacgaatctgtttcggggaaagaaagccctcgacaccgctcgcatggcgaccgaacgttttcagaatacgatgctcgaaggggcccggaacgcccagcaggaggtcgtaaaattgaatcttctctaccgggccgcaacggataacgcccgtgccacagacgatcgccgggatgccgtgcgcaaactcaaagaggagttttcgggttatttcaagaatctttccgacgagcaaatcatgctcggacaagcgaatgacacttacaaggagctgatcaaaaacatttacaaatacgccaaagcacaggcggctttcaagagcctggtggatatcgaacagcaagagctgttcttcaataacataccggatatcgaacaattccgaaaggattatgacaaatacctcgaggcccaaaaggatgttgctgacaaacggaaaatctacgatgcggcgacgtggacccaacggggcaatgcgtctaaaatgtacaaagatctctcttgggcggaaaccattctgtcagatgcagaagaaagtgtttcttactggcaggaaaggattttcgaagagatcaggaagaacaaaggaggagaagagattatcgatgagatagaggagaaattcgatggcaacctcggggcatttctgcaatttctcgcagagcagcggacgaaattggctgccgtggcggagcaggcccagttgctggaaaacccgtccggcacgccgagcgcgaccggtagcgaaccggcttccaccgaccaactcacagaacagtataaggcggccgtacgtcgccaacagcagagcctcgacgaccagcgggtcgagttgattgaaaacgaattcgaccgggaacgggaagcgatccgcctcaattacgagaaaaaccgtcaggaatatgagcggcaggaacaacagacgctcgcgctgattcgcaaactccgggagtcgggggccgatatcgattcgaatgcggagaaaacctttatggctggcacggccgctgcaatagcccaagctgcggaaattcgggacagagagcttgcggatgtcgataagaaagaggaggcttcatacaccaagttgctggagaagtacgaaacctaccagcaggggcgtctgcgaatcgcccggaaatacgatcaggatattgccgctcttgcctcaaatccggaggcccagcgactcgctcgcgaggccaaacaaaaagcgctcgacgacttcacggaacaatttgcaagccagttcccggaattcgaagcctgggccgaccgggtcgtcgctgcctcggtcaaaaagctggaaagcctggtgatcgaagctcaggaagagctggagaacctgcaaagcgaaacgccggatgacggtaatgccatcgccgttgcgcgggccaaactccgcaaggccgaacagcaactggcgaaaaaacagaaccaaacggaacaggaaactaccgatacgacttcctggacggagcttcaccgcgtattgaccgacgtcatcggtaccttcaatgaggtcggcgatgccgtcgggggtgccggaggaaccatcatcgccaccgcaggagatatcgccggctctaccctgcaaatcatcaatgccgttcaggcataccggaaagctcaagccgcatcgaacacactcggcatggcctccggaattctcggaggcatatctgccggtatcggtgcgctgaccactattgtcaatttgttcaagggcggtgaaacttcgatggagcgcaaccttcgtctggcccgcgagttcaatgaagaacttcggatcatgaaagagcgtagccgtatcgactccgatgaattcgacaatatcttcggggatcgagtgtacgaccgttacaagcaaaatatcgatgtggtgcgcacctcgctcgaggaactggagaaagtccgggagagaatcctctcgcgcggggaagaaaaatatcagttgccgggagagtggcgaggcggagccggcacgggactttcgggcttgttcaggtacgaaaaaacttgggagaacattgccgattcgatcgccaacatgcaggttcagacacgtcactcgacctggttccgttcggcaaaatatcagtccctcggttcgctgcttcccgaattattcacggatggcgaagtcgatatggacgcgctccggcaattcgtcgaagagggcggagaaactttccagcacctggcacgggagaatcaggagatgctccgcgaaatggtggacgactgggaaacctacgaagaggcattgactgcggtccgggattatttgcaggatattttcggcgatctgggcagtacgcttaccgatgctttggtggatgctttcgaaaacggcaccgatgcggcgaatacttttgttgatagtgtcggacaagccttgcgcttgctgggtaagcgtatggcctcctcgatcgtgttcggtaaattattcgaagatacccaaaaacgcatcgaaaaggtcatgcagagcgacctttccgacgaagagcgtttcgctcaatggagcgaaacgatgaaatcgctggtttcgggcgtcatggatcaacaggacgatttcaatcgtctgtgggaagagttccgccgcattgcaaaagagaacggattttcgattgacgaggaagccggcacttcgcagcagaacggtaaggccggagccactcagactgtaacgcaggattcgttctcccgcgtcgaaggactggtcacatcggtacagatccattccgcgaatatcgatgaaaacaccgaaggtattgtcccggttctcaaagggtcactcgaagcgatgaatgccatccgggaaaataccgaaccgataccccaaatctatgaactgttgcaaaccataaaacgcgacggattaaaagcgatctgattatggctgaaatactcgaaggactgttgctgatcaaccaaacggatgtatatgcccgtttcggggctttcctcgcggaaaccgccgaagacagacacgacaactacgattcgctgctcgcacctccggctctcaagcagcaggcggaggtttccattcgggaggaggacggcgtccgtatgcccgatatactgacgcagacttatgaagcccgtgatattacgctgcgattcgccatcgtcgcctcgaacgatgtttcgttcttcatgcgctacgcctcgttcgtgaaatttctcaaggagggcgacgacgggtggctggcgctccatctgacggacgtagggctgaaattccgggtttatatgaccggattttcggattattcacaactggcgccattcggaaagggagaggtcgcggcgaccttctcggtgaaattccgggagccgaagccgacattcgaactcgctgcgtcgatctaaaggtcacgttcaaatcttcaaaaaatggaactcaaaatatattcgaaagaagggaatctgaagctgacggcctctcccgatagtaacagtgctgcaacctgcggcatacaggaggagagtgtcctctcgctctccttcacggccttcgaatgcgtcacgctcgaagtttacgattatgcggacttcctcggacggcgttattggattctcgaacgttatcagccgaagatgaactgcgacagcgaatggagctactcggtgcaactgtcgggggtcgaaggactcaccacgcaggtcctgatggtcaatccggatgatgacgacaatccgattctgacactcacggcaccggcacgcgaacatgcggcgctgattatcgctaacatgaaccgcaaaatggggacgaccgaatggaaagtcggagaagtggtcgtatcggagtacatcgatatcgaatatacgggaaagtacgcctccgatgcactttcggaactgtcgtctgccgccgggacggagtggtggttcgacgggatgacgctcaacatatcccgctgtgagttcggcgagcctgtcccgttgtcttacggcgacggattgatcggaggaatcgaacggagcatggccgatggcgtgaaatttttcactcggctctttccggtaggctcctcccgcaacatcgatccggatcggtacggacatgcccggctgcaattgcccgacggggcgaagtacgtcgaacaggatacccacctcggtatcatcgaatatttcgagcaggaagcgttcgatgcgatatatccccgccggatcgggacggtcggtgccgtacggtccgaagagcgcacgagcgatgacggctctccgtttacggtctggtatttcaccgatcccgacattccgttcgatcccaatcaatacgaaataggcggcctcgtcaaacgggtgacctttcagaccggagagcttcgcggacgggagttcgaagtgaattacgactcggaaaagaaggagttcgagatcatcacccaatggccctacgacaacgatatgcagttgccgtcagaaccgttggtcccggctcccgggaacgaatacgtgctctggaatatcagtatgccggacagttattatcctgcggccgaacaggaattcaaaactgcggtagatacctttatggccgacagccgtaaagatatatccgtgttccaggcatcgacggattttacggttgtcgataaaagaaacctcgatttgaagccagggcaacggattcggctcggaagcgacaagttttttcccgataccggataccgcgatatccgtatcgtcgcgatcagtcgctccgtcgttcagcccggaagcatgactctcaaaatgagcgatgtcctctccacaggccgtatttcccgcatcgaaaatcagatttcggaagtgacgcagataacccggcaggtttcatcggaatttcctgacatcattaaatcgtgggaggaaacaccagcgagcgacacgacgctctattcgtcgcgtaagagcgaacgggaatttctcaacaagcgccggggaggtacggtcgaaggaatcacccgattccttaagcggcagcagctcgacgagggattccggacaagcgactttgccagcggcatcaccggcttcggtgcacagatcgacggacgaggcgccggcgagttggagagcctcttcatccgtcgttttctggaggttccggagcttcggaaaaaccgtgtcggcatcagcgtcggggatgactggagcgctccgggcgccggggtgatcgagagcgtggacaaggatcagaagctcgtaacgctcaaactcgaagagggcgagatcggcgccgtagcggtcgaggatatatgtatgggtatcttccacgacttcgacccgtcgaacaatgcgacggcagattccgacgacggccggggcaacttctctttcgcaggcttcgcaacggtctatttccgtatcacggaggtcttgggcgaccgcaacgagcagttccgctacgagctgcgccccctgtcggctacctttaccaggcagatcgacccgatggaatcgatgaccttcgtggcctacggctcgttcacgaatcccgcccggcagagctcgcgctactcgacgcgcacctaccagcgttatctgcgcaatgtcagcgactgggagttcacggccgagaatatcgccgcgcagttcggcgatcttacgaacctctccgtcttcgggatccaaatgtcgggctattcggcctatctggataatatctacctgcaaggtatgatcagcagcctggacaagaaggcgctgctggacacccggagcaagctgttccggctggtcggcgacaacggcgtcggcgtggcatttaccccggaggcaggctggaagcaaggcaagctctacgaccccgcgacgggacagtttcaaaaggagttcgacatcgaacacgcgtagttgctcgatcctttcacaacggctactccgttgggtgcaatcaggttcttgcggatgtcggtcacgaaagaaaaagtaatcgcttcgacagctgcggatgccgcatttccgagtcctccggacgaggatgcttccactgttacttttatatagtagttgccgggggtcgtaaaacgataactaatgttcttgttgatctgtatcgataccgtgtcgtcatatgcggaagattgccggaatatcgtgtcggtagtatcggctgtctggttgataatttcgatcttcacgcttcctccgctccggatcgtccccttgacttgtgccgacatctgcacctccgcgccgcatttgaattgacttgagtttctggaatccgaggcgaaaggcttcgtttgagaggttatgaccgccacatttcccgttgtttggctcgacgggactttggaagaacccaaaacctggcttacgctgtttatattgttagtagtgagtatgatcttgtttccgcttgcggtttagttggttatgaatggagttatctttttacaagtaatggggaataactctaaactttacagaccatgaaaacattaaatgaaagggcgacagaaattctgaaagccttgttagccgtgcgggctaaaaaactgaaaatcaaaaatgcaagccagacaatccatgtgaaactgactgactgcatcggaaagtacaaccttatttcgctgacacagcacatcgaaataaatggcgttcttttccgtgaccccgaagtgatttttgctttcaacaccattaaacggcagtttatcccttaccactacatcaacgatttttttgaaatcgagaaatgttgcgccacaccgacggtagagggattaatacctcgcaacgaaatagaccaacacaatttagcatgtttcgtaaaccgttggctgttgcaactaacctcaaaactggaaatccaatggatgcgcaacgaatagtacagaattgtgttttgaagaatcaaagcacggttatcgaggaaatgatacgggcaaaccttatttccgaagaatatctttatccgttcgtagggacagtcgcgaaataggcttaaaattataacaaattgattgtcaatgtgataaaaatttcatatcttagctacaggaattaaaaattcctccgaacaccctggaaaagtgactttcggaggaaatgagcaaaaataactcatggcaaaagtacgaaatttatctgacattcagcaagagattgcatttacagagtttgatttttatcagcgatacgaagagagcttcaaaacatcggaacttggacggatcaagtcacttcttcctcttcgagagatggcgatatcgttcggtttagtagaagagaagccgaagagtttgagagtgaagcgaggacgaaagtccttcttcacacctgagggcaaggtggcgttggcgttcttgaagatgtatacaggattgtcagctccgaagctgatggatgcgttgaatggaaacatccattatcagatcttctgcgggatcaggatcagtcctgagaaccagttgacaaactacaagctgatcgacagcattctggtagaattgtccaagaaactgaagattcaggagcagcagaaggtacttgcagatgcatggaagccgtacatgaagaaccttgatactgtctatacagatgccagctgctatgaaagcctgatgcgctttccaactgacgtgaagttgctttgggaatgtgtagatagagcatacaagatgatgtgcggtatcagttctcagcttggtgagcatcgaatgagaacaaagtacaatgatatcgacaaggcgaacctggcatataggaagcagcgcaaacatactcataagcagaccagaaagatgataatgagactgcttgcattgctgggcaagatactgggagaaatccgcagacagatgcgcgtccatccggatgaagaactattgaattacaagcagttggatatgcttgagactgtcacaagggtatatcgtcagcagaagaaccacttcaagagtggtgactctcgtgagagtatccctaaccgtattgtaagtctcagcaagccttacatcagaccgatagtcagaggcaaggagaccaagatagtcgaatttggagcgaagtgcaacaacatattgattgacggaatatcgtttattgagaagctatcattcaatgcattcaatgaaggaacgagacttaagcactgtgtgtcattgtcgaagaaacttacaggcgttgatgtaaaaaagataggtggcgaccagggttactcgggtaatgacaacagaactttctgcaaggagaatggtattgaaacctcattcactcagaaaggacgaactggaaagaatgaagttaagaacgctactaaacgagaacttgcacgcgttcgagctacagcaatggaaggctcttttggaactcagaaggagcattatggtctgcgaaagattgctgcaaggataaaatcgacagagatcatgctgatcttcttcggtatccacacagcaaatgtggtaaaccttgcaagacgagagtcagtccaagtagctcttgcagcctgatgttccacgcatggaacacgactttacgggagtggtagctccagacgtgactgaaaatgaaaaaatcggccctaaaaacagagccgatgatataaaaaacgatgagtatgatcggaaaaataagggaaagtctgctggttaa
